United States Patent Application Publication US 2026/0058010 A1 - sequence listing, part 59

SEQ ID NO: 685 - DNA, 370315 bp, Homo sapiens
  source 1..370315: mol_type = genomic DNA
taatttagccctacgccaccaaccgtcaaatcgaatcttctattggtagttactgagggctcacctgggctccatggggtttgggataaatccagagctggagagggccctgagacggagatgtggcaggccccgggacatactggtcccatcgacagtcccagcactgcccaaaaggtaggcctggctgtggatgtgtggcagcctcactcagacatagccccagccccaggccccaagccccagtccacgggtgggcacacttagaggaacactggtgtctaccctggggtcttcccccaaaactgccaggtctccaggaggctgaaaattggcattcacagccttcagtttccaggaggcaacagcccactactggcagggtctgctctatgattcacatatgtaagatgccttttgaaaaactgaaagccccacccgcgtgagaacattacatgaggtgacagaaagaaaggggaactcttataggtcaccagaagccccttgatatgggagtcttctagaagatgatgggtataattgctccaaattccacacccgtgacttagtattacattataattaggtgcaatctgtctgcctgtttcatttccgctctgcagagggtaataaccaatttccttgccccttgtgaaaagttagcaaggaagggtttccccgtgcaagttctggcctctgattggcaagtcagctgagcaccagcatgatggaggtgtgggaggtaacatggaggaggcctggagaccaaggctgctgggtgggccctgggaggccagcagggccaggagtaggtgaaataagcaaggtgcctagagtgtaaaatgcaagaggacacccattcccagcacttgcaggtgtaggggggccctgagagcgagtgccccctgaaataatgtaccccaggcccctgcctgcctcactccagacctggcccccgccaccagtctcaatgctctcacatcctactgatctctatgactgggaacctgcggctcctacctggctctgctctgcagtccccagtcacacatctccgtgcctcagaacccaagtgccacctggagtcctggcaagggaagggctacccacttgcctgcctgtatccaacaaaggggaaagccaaccctgaagggaaagccaagaagacttcacaatcagcatggtgaccaacctgctgcgtggccttgggaaagctgcacgttacccttgggcctctgtttccccatccaagagtgggaagatcagggtattccatcattaaggggtcttctgctttgactcctgtggccactgccagcctgtccagtctgcatgcattaggttactacgattcttttccaaggggagcagggtctattgtgtgcaggtccccaagggcgtgtgcaagcccacaggaacttgtaggggaacacaccttacaggagctgacagccccccacgcggccctaggctggggaggagagaaccaggcagccggatgctaatcgcatggattccctttattgaactgtactagttactgcagtcagattaagtcacatttaaaagcagaccatccagttgcactgaaaccgattatattcattacatagttttaatcactgtccggtgaactggcaaatccaatcaaagcattagtctttaattaaaaaattaaaaggaaatattcagacaatagccaagcaatcacatcacgatgcacaattacctagaattgcaattaaaaagtagttaaccgaagggggtggggggtgggggggaagaaaaacaagaaagaaaaaaaagaagcaaagaaaaaaaatcacactaattcttttttaaaaactatcaatataatacatgaaggaacaaaggacaatagccttaaaaagcaggtttctctaactctagaaatgtagtctgcggcggaaagtctaaaagcacactagctgtagcaggacaataaaaaatactgagcatggaatacttttaatctctgccattaatattcatttccagctgcttataatagcagcgcctcatggccaaatcattagagttttacatctgggttgcaaatgacactttgattggatgtaatgttcaaatggccctccccacggcgtctccggcaagccttctgcggagaggtgtcctgttgagcgatccctcactgtgcgtgctggctcatcgtgtggttctgcaaaggcgaagaaaggagacacacatgaaggagaagaatggagagcatgctcgtccctcccactcagtgcatttacgccgggagccgcagaaaagcgtctcgattataacaaaacaaaatgcaacaaggaaaaagtgctccagggacgcagctgccaagacgccacgttgatttggggcttggggataggttcctgttactgccaacttggactccctatatgttgttttttggctttttttttttttttttttttaaagaccattcaggtcttaccggggggactggctaggtggagggaaaggggaaatgccggggaggaggcaggaattaaaaacatccctgttcacctctccatctcccttttcctctaatgaagaggaggaaactctgatcgcctgcaggctgccctcgcatccccctctcagtcttccccgtggctgctccgagcctagcagagggagacagcagatgtgctgtgcagctctccggccaagaaacacccgagcgggcacaggcgtgctgaggcagtgggcggccgtggtgcctgcggcccaggcaggggacaggtcacccggcaggaagacgcgggaggagcctctgctgctgggctccgggagcctgcctgcttggtcacatggcaatggcccaaccagagacagggactcagtgcagtttggccgaatgcacctaggaatccagggcccaggtgggaccctgtggccaaatgtttccctctcattacagtcaatggcatttcctccccctgccagccagagggggccagcagggttgatctgtttcacaggagccagcggcctgggactgggggtgggatttggcatctgaaagccgtctttttgtttcttttcagtggttcgtgttccaaattcagacccatttcatcaaagcctcaggtggtgctccacctcatgacacctggagaaaggaggcaacatccaccaggtgtagggtggccctgtttggggccgcacaggaccctagatccccgggagaggctccttctgggcgccccccagggcccggcgactcctgcagctgtgccgctgaccgccaggggtcagcagaggcaccgcgtctctcctgggctcgggtccgcggcgagggcgaccaggtgatgccagtagcctcgcccggaggccgaggccggggccggggccggggccggggccgagacgggccactcctgctccctggagcagggccccgcgcagtcccttcccgtgacgggcactgcgaaggctgcggcccccgtggtaatgtcaccgacccttcctgcgagctcccggccgggaagaggcagcccgcgcctgcctcccagcagatgcccacagcgccaagcgacagcctcgtgctcatgcgggcggagcaggcgcacggccggggcttggtgggcatgcgtgctctgtgccgtggcaggcaccgctctttcaatcctcacaacagccttgcgaggtgggacttcttaagatgaagacaccgaggcctaggaaggcaaaaattacaggcccaaggtcacccaggttggaagcaccgggcactgaaccagatggctggaatccactagagcaaggggattttcaggggagccaggcttcccagggcctgcaccccatgggcaccgcagtctgcaaatcacccgcattctgcaccagacacagtgccacctctgccggccgggcctgacacctcggtcgggggcgtcagggacccagaggcaccaggcaggttgtctgaggccacagatgggatgcaggcggtttccatgggaacccgcaccctccagccgtggcacctctccctgtacttgtgcagggacagccagctagtcctgtggggagccgaatccacactctacacagccatcctcctgctaccttcaagcctctgctgactcagttcccgcctcccttctcctccctcccaaccaagctgctctttgagtcctctaggcacatggatcacttcccatccctgcagacctctccaggcacctgcagcccacctcccacacagccacgcacctctcatgagctagactgacctcctttgctgagctgcacacagggtggcggcacctcctttctcaggacccagggctgggcatgcactgtcctgaccatacgcctgggcctccaatccccagcaggcacagctgcccaggagcaacttggaggtctgcactttcacaccctgccaaccgccagtcaaaaacccctgctatcttggtgtgggtgggtcattctttattagggggaggacagggaggaggaagagaggggacatgaggaagggagacatggacagctctttcttgtcctcaaattatggttcctagggcctggcacaaagtagacactcaggcagtatttgtgaatgagtcaatggaaagaaaacgaatgaatgtatggataggatgtggatatgtggaaaggggagagggcattccaagaggaaagaatagcagagacggaggtgtggagcctagaatccaagtggcgatgcaggcacaggtcccagcacagaagtcacaggaaggctggtgggcacatggcctacggacagtggaggccttgagtaccaacaaacatggactttgttccacaggccacagaaaaccagacatgatattcgatctccacaaaatccccaaggaccacccactaccaacatgggcacagggggtgtctgggatctctggagaatgaagcagcctgttgccaggatgccaagaacaggctcagtgtgacacacatggcccacactggctcaccagggcactgctggtgcagacatgatgaaggctggaacccacacctgggaccactggtgaggaaaactccagaatgcctatgccattccccaggaaaagccacagtgtgcctgcccacttaaatagcagtagcagggggctctgaggttacactcaagaaagaacttcctcctagagggttctgagacagaaggataaaacttccttccctgaagttttgtgacaggaacaaaagcccaggatgtcacagcagatggaaatgtcaaaacttgatgccccaaggggaccaggcaccagaattcactcagcactacattattaagcacctgctggatgctctgctctgcactggcacagtgagggggaggggaagacaccagctgggcctacccctcgaggggcctgatttagaggggctagacacagacacccaaacatttgtgggattaatggtgcagctggcagctcagctagggaaactggtcaaggtcacccgatcagtttgtgtgatggtggtggggagcccagaggtgcccaggtgctcagccaaggagggcattggctcctccataggccaagggcagtatctcaacaggcagaggaggtggtgggacccctgtccccaagacttaccagtcgcccaacaccaggacacagagcagctctggacagctactgcaatcagcacagttcaataaccgtgaaagaacccgtggtccgtcccccacagctagaagctgtggtttgaggaacgtggggaggttcagcaaaccttcttaaagagttctttccatccagcatagttctcacaagggcattcagccttaatgtctctttctctgtttatgcctgtgctatatttagcccctttagagaaggaagaaaatcgttttttaaagatgctacccaccccacagatgaacacttcccaccaccataaaggctgggggtggagacaggggcccagggaaggactggaaaatgcctagagggaggcctggcatccactcggcctcgctgcctgccagggagacacaggtgtgggccagagaagcaggtgaggaaaataaaacgggagagcaggagggggtgggcagcaatggtttgcagcctcaatccatccactcagcagagctcgtgtgctctcctggatggaggtttctggtacagcctgttttgggggcctctgcctggcacacggggccagggacacaagacagtgatagccaaggggatggcatgggcccgggcacagaaacctgtgtgctgcctatgctgggggcaggcctaccctgggtcctggtgagacccacaaaaagagccctctctgtgcaaatcgtcagcagagcactcaggaactggttccctgacacaccctcagcctctggaaggaaagaagcccagcattcatttcatggttgctcattcattcattcgtctttgagccaatgagccactatgcttgttgctgggaattcagcagcaaaatgatcctgatcctgaacccaatccagggtaatgttttgtgcatggaaggagcgggccagagtacagagcctggtggctacactgtccttcccaaagcaccgccacacactagagggaatgggctccttggaggttcagctggggtctgatgctggttttgcgcgccccaggagggggccctggctcagcccacctccatgcccaacacagtcacaaacaggaacactgtgtgcctctccctagtgtgaagcccaggattgcttctcaagatcttggctccattctctgttgcttaggcgtgggaccctgcctggtctccctttgatacctatccatcaccatgtcaagtgggagagacgtgaggggcttaagcatgccagcagcataaagcaaaagagcttctccacacaccctgctagctgcctctcctggctctcagctactctgaggacagtgtctgtaaagtcctagcaccttgccttgtccttggcaagtgctccattggtgctagccactgccctggtgacctcaaggtgggcaggaagctttcgtgggccgagatgggctacgccttgggtttgaatcttggctctgccacttactggccatgtggccttgggcaagttctgtgacctccgggttttgggggtggttaataacacagccctcttcctaagatgctgatagggtttggatgtttgtcccctccaaatctcatgttgaaatgggatccccagtgttggaggtggggcctagtgggaggtgtttaggtcatgggagaggatccctcacggacagcttggtgtcctctgggcagtaatgacttaccattagatctgcttgttaaaaaatgtctggtgcctccttgcaatctctctctctccccatgtgacggactagctccccttgccttccatcatcattggaagcttcctgaggcctcaccagaaacagatggtggcgccttgcttcctgtacagcctatagaactgtgaaccaaataaaactgttttcttcataaattacccagcctcaagtatttctttatagcaacacaaaacagactaatacagatgccctgaggactcaggagataatgcctgcatacgtcccagtctggctacggcaaatgctccacagatctccatagtggtgtctgtgctggtcttcctgacccagcagggtgctctgtggcatgaggactgtcttctggtcttcctgacctggcagggtgctccacggcagagggactgtttgctccctgccacttctgtgggaccaggcacgattggggcttacagtgagggcctcatagaggtttaatggactgaccagctgtacccctcccccttcccctctgggtgtccaaagggctggcaaggtcttaagaacaatcccgagatggctgaactttggatggtcctgcccttggaacaacaggtgtcattatcccctccccataatcccccctggctagaacccctgtacccacaaatcactgctttctcctccccaccctcaggaacagaatgccatgtctgcaggggaggacagcctcagggagactccacaggggatggaataggtgtgcactcatccacccatccactcacccatccatccatccgcccatctattcatctatccatccatccatccatgcatacatttcttccacagatgttcactgagttcctgtctgtcaggccctgggctgggcactgggcacagacaggttgagaagctccagcgccctcccgtgaggagctcacaatttcatggtgagggtgccgatggccaaactcatagaccctgaagaccattaagaggcaaaaaagaaggcttggctcttctctggagactaggccgtggttctggcccttgagtctttgagtccctatagcatatgaaggcacaagaacactcagcccccacacccagagcatcccaccctgctctcccggccccacctgcagagccacccggcctgcacatcacctcactgtgatttccggttgggaaagaggttgtggccaatcccccttctccccactgcccaccactggccactccctggcaggttccagccacagtggctctcacaaggctggctttacaactcactttctccaggagctagggccaagcccgagaatgcaccttaaccactgagagattccctttccaggggaagaagtagcccttgaggctgaagtggcagccatgttcgtgctcagcaggggtgaagttgggtcccgttatttgttcacttagcaaacaaggcacctggccctgtgcagtagacggaagagagcaagtgaggcacaatcctggccttttaaggactatagagagaggacttccaataggagatgcttaaggaagaagctggccttttagctgccctttaaggacagcccaggtgaggatttgcactgggtgtgtgtgtgagagcttgagagatggttttccaggcagagtgaacccctggacaacagcacgaaggtgggaatggcaccgatcatgatcgctgctaacactgatggtaggctcactgtgtgccagacaccattcttaacctccacccatattagctcatttaagcctcacgactgccctgcgcattaaatactctcatcctccctattttacagatgagaaaactgaggcgcagagaggcccaggtcctgccactggtgatggcagtgctgggtctgcacccatgcagtctgtctgcagagcccactcttcaccaccacactgttctgcctgtgagatgtgaaaagtgcagcatatgttgggggaacaatgaataattcagcttggcagaagcacagggtatgtgccatggagaccagcctggagaggaaggcgggggccttattgatgaggctccttgatgccagacgaggcagcttgcccttaaatctgggccatggggagccatggaaggtatttgagctgtggagttacaggagaggcaagacacagggagaagctcatgcctccagccaaaaaggtgtgtcagcagggccttctcgcccatcatttccctctgctcccatcccctgttccctggaaaaccttcccctttcctcccacactttacttctttccctttgggaagggtatagatacaggcagccctgcctcccctatctgctgtgtatcacctgggcagcccctctctgcttgtgagcacttatttttagaagaatttgacaatcgtccaagggtctaagacgaacagatggcctgtcttaaaggctcatatgttcgctagtttgcacttctgacaaacggtaagcatactcgagagcacaccataaacagcgccgaatgaatactcagaacacaatttagctaatgcatgtcattaaaattaggagtgagtgatggccaaggttccctctaaatgcctgccctgtgatgcagtcaatcccccggggcccaggctatgacgtggacacacctcacttctcccatgacccccacccagcaagccgaggtttgcctcatttacgcagatggcagggcaaggtttgcccgagtgggtgtgacacccaaccctggcctcagagtgaagctggtggcccactggccttggacaaagccctgagatgtcctatggcagagggagcagcagctcttccatgcacgggatgtgcgtgaggttttcccgtccctgcctgccagacagtgaggcagcctgtcgtctgccaccccggagcagcaggagatgagtgttgcaacgctcagccagggaagctgtctctcatgtgagagcctcaattcatccggaactcccggcctagagggagattccaacttccagggagcaaggggattggctttggggtgggggttctgcagcttccttgccgaaccagtagcagaagcagatgcagcgacctgagtcacctggggtaacatttgagaaagagccacatccacacagcctctgacccagactccttttattgatgccaaccggatccaggttttccgtgttcttgagatgctctatggagccgaggcggggaggagggtgccccccactttccgtgaaccccctcttgccaggacacaaaagaccaacgcaggtggcttggtcaacaatcagttccatgagcaggaaactcttccctcgcatgaaaacgtgggagaaaatattgtggggaagaaaaaagcccaataaactcccaagagggcaggttctgtactgctgtactttggaaataaaacccaccaggggatagattattaggagggaaccgaagccttctattaggaacccagcccgtaaacaggctcccattcagagtcacccaacaaaacaaggggactaataatacctgcctggagggacaggggactcaggggagctgcacttcagaatgcaaatgggccccgtcagtctgtttgtgagcagagaattgggtgagcggtgagactttagatagcagccgtgcaagggaaaatgagagttttatggctgttgtcacaagcaaaggaagatggaatgcttccagggctgcttatagacttgctcctcctcagcaacagagtctatgcctgactctgaggcctgagttaatgtgacccccacctactgctgctgtttctccaaagaaggtgggggtaccctgtggctaagccccttggggacagggtacctagcagcagattcaggactgaaaatcgggggtcctagcaacagtgtgccaggtgaccacaagttcacttctgtggcctttggccccctcctgggtagaaatgctgcactgatcttgtcaacctgtggccactgcaaactccattctaaccacagcagcctgcttgaaaccaggcccccgtgggacagctcatctcaaatatgaattagtgcacagtcccctgccctaaaagagcctgaatcagacccctaaaagatggggccccaatctgatgctgctgggccaggaatccagtcaagtgcacctcttgcaaagccttgagaagagcctggggtggaagtgacgaaactccataaaaaatggcactggagctgggtgagtggctcatgcccggaatcccagcactttggaggctgaagtgggaggatcacttgaagccaggagtttgagatcagcctgggtgaaaccccatctctacgaaaaaaaaaaaaaattaggtgggtgtggtggcgtgtgcctgtagtcccagctactcggatggctgaggcgggaggatcacttgagcccagaaatttgaggctgcagtgaactaggatcatgccagtgcactccagccacagggtgagacctcatttaaaaaaaaaaaaggctattgggtggacgggttctcaaaaccaaaaaagggttcacttcaaagtatatctgttgctcttagtgtgggtcaaagaagatcatgcacgtgaagcagtttgggaagacggaagcacctgtcagcaggggtaccaatgctcagaaaatgtttatgtcatgaaaaagagcgggtgaattccaggagatctgtctgcagtggggaggattcctctgaccacatggaactgcatgtctggatggaggcctcaagattagagtgtgggtgctgtcaggttcacaccatggacaagtgcagcacaggccaggtgcaaagcagtaagacccagtggggtctgtgtcagccccaagaactcaaactttgtcaagaagaggcagcacttgtcagctctaggcaatgactgccacatgcgaatataggcccagtgttgcttccggttttgcaagaaaactggaaatttagatttgtttaaaatatcagctttcttagaggaatgcttatacactgttggtgggaatgcagattagttcagacactgtggaaagcagtttggagatttttcaaagaactaagaattgaactaccattcaacccagcaatcccattactgcagatgcatccaaaggaaaataagcattccaccaaaaagaaacatgaactcatatgtccactgcagcactattgacagtagcgaagacatgaaaccaacccaggcgcccaccaagagtgggttggataatgaaaatgtggtacatatatatatcatggaatattatgcatccataaaaaagaataaaatcatgtcctttgcagcaacatggatgcagctagcagccattatcctaagtgaactaatgcagacacagaaaaccaaataccacatgttctcactcataagtgggagttaaacactgtggtgcgcacagacataaagttgggagcaatagaaactggggaataaaagagctgggagggagggaggggacaagggttgaaaaacaacctatgaggtactatgttcatgacctgggtgatgcattcagtcataccccaaacctcagcagcatgcaatatacccatgtaattaacctgcacatgtattcctggaatctaaaataaaagttgggggaaaacggaagtaaaataaatccataaactttcttgatgtttaaagtactatgcaagcccacgaaaacatatctgcaggttgaatctggccctcgggccaccagcttgagacctctggggttggtgagggcctcgagaagccccagacaccctgaagtgaggtggggagtggtgtcattaggcagcagatggcccaacattagttgaatcctcagccaaggggctgggatgtgggactcggtgtggttaagttctgacaaagagggtaagggtagaagatgaagttctgttaagacagaaccatccatatgtcctgggttctgctgcctcatgggcattcccacccagccagcccaagtgtttctgggtgcgccaggtgctggcaaacctgggagaccaaggagcatgtaaggagaccagaaactcccactttcctagagccacccaggaggctcaacacggctgtctcgggggttgtccgtgggctatctggagagacaagcgccagagtttgccacatgaccgcattcaaaaatctggaccataagtaacccccacaccttccttgcttcaaaggacctgagatccctcccttctaccctccacagtgtcccatggggaataggagaggccaggcatggtagaggggcagccccttggggtgcttacgaaagcagcctcccaaggcagcgttcctattactgtgcacacaccactctatatgcatgcacacacacaaatactctagacacacacacacacacacacacacacacctgcccccgtcatgtgcccaccctccccacacacggataccccccaatcccatgtgcccacacacataggtccccacaatcccatgtgcacgcatacacacacacacacacacacacacacacacatggatgccccacaatcccatgcacactcacacacacacggataccccacaatcccatgcacactcatggacaccccacaaccccatgcaggtacacactcatggataccctcgaatccccccccagaaacacacacacacaccccagtcctgacactaaccatgtagtgctaagcggtcagaggccagttacttttactttggccttctgtctaccctgtgcggctaatctgccccacgttcaccccactgctgagtccctccagcagccccacctgcccaggacgcaagggccccttgaaggcccccttcctggcaaaggaaagctgagaaaacaacgtgaagcacagtccgggttgtctcctcgaggaggcagagctgtagaagggtttctgctttttaaactccctggcgggtcccacccacacccggaacacatccggactctgaccacagcccagatggccctccatggtctggttcttgctggcccacagcctcagccaccaccttctgccaggcccccaaacaccgcagcccggaagcccctccccctcccagcagcactcccgctatccagagtgtcccccacaccccagttttcctggggcttctccacatcggagccatcctcctggagcaggcttcctgtccgctgaccacagactcccatcacaacatcgctctgcaccttgcagaggcttcaactctgcatgtcctgcaacttgcagtgacctggttgttgacgcaccatggccaactgcccctcatgacaccatcagcgcaacaagacagggaccttgtctcagctctccactgtaccccattagctcagagcctgtgcttggtaaaaactcaacgagtatttctgaaatgacagcctgcaagctactgtagcaaagccaggcctccactgatagggtcaagggagaagaagaaaaaatacagttgccccgctccactgtcttccccataacccttgccccggccatgcccagagcaggttatacctttttcttaaagctgggatggatcctttgaggacactaggccaggtggaatgaattattatatgatttctcttgtacgaggtgcctaaaacagccaaatcatagagatggaaagtggaacagtggctgctgggggctgggaaaaggggaaatggggagttaatgtttaacaggaacagagtttcagatgggaaagatgaaaaagttctggaggtagatggtggtgatgattgcacaacagtgtcaatgtgctgaatgccactgaaccagcacttaaaagtggttaagatggtaaattttatgctacgtgaatttttacaatgaaaaacaggccaggcacagtggctcacacctgtaatcccagcaccttgggaggccagcactttgggaggccaaggtgggcagaacacttgaggccacgagttcgataccagcctagccaacatggcgaaaccccatctctaccaaaaatgcaaaaattagctgggcatggcagcgtgtgtctgtaatcccagctactcgggaggctgaggcaggagaatcacttgaacccaggaagcggaggttgcaatgagctgagattgtgccactgcactccagcctgggtgacaaaatgagactctgtcaccaccaccaacaacaaaaaagtgggcaggatcttagaaggtaagagaaagggttgctgcaccaatagctaagacactcagcgacattcctggctggaaggtgcacagatcatagcagcccgagacatcctcagctgggtgggagggagccacagcatcccaggacaacatgccaccagctgagtgcaagcagaggggctttctctgtgctgctggggctgagccatccactgttgtctacagtgtggctcccagtgccagctagtggaagaacagaagacctcaagagacttgtggaactgggagctctttcccctatggaaaggcctcacctgcagtcataggccagtccagcaaagggggccctgatggcttacaaatgctgcaggaaggaagtgtctgtgtttgctctggcagggcaggtgggaggcaggaaggtgagcacagggcacacctacacatgacatgttttgccaggttggaaaaaaataagtgggagaaaattttttctgactctgcaagcctttaccactttaaatatttattcatcaaaatatgatgagaaaaccaagatccacatagagtcaccatattccacaaaccaaaaatcaggacaaacagccaagagctgggatggagtacttgaaatcaggactgtactggaaaatctaggtcacacggtcactaattatacagaacacatatgttcaggtccccaaactaacccagtgcttttaggatttgcaaatgatataaggaaactttgatcgtgtccatttttactttcttccaaattttggttaaaaggaaaactttcctgcatcctcaaaatttctagaaaattaagtcctacagactaagaactgttctggcggatattctgagggggcctcctcagaaaacatggcccatcaacccccaagaatggcccccagcccctcatggcccagcccccttgctgacagacccccaggctgcagggcagaagcttgtaaggatggacctaatttgctgtgataaattgtgtgcacgcaccagtgatcaaaactgcagctgagaccgattacactttatgattgtgacggttcttgggaaacacgtaggtgtacatccttgccagtccagagagggggtccaacctggcacccagcaaagggtgatcccgtcacccagaaaggcagggctccatgggctgcccactctttggaagctggtcccactgatgaggctgaagaatgctgtggcctggcctcaaatgcctcgtctgccctctcatacatacccagcctccaaccaaacagtgggcacattgtcactgcccagatacctgccccacaatgatcaagtgggtctgccctgtgccccccacttctatcaccaggcagaagtcactggttttcataatgcaaaccaagaattatctatatcgccagtctgtcccatcccactcatctcaccagaggggtgtgtgctttcgtgtgtgtgtgtatgtgtgtgtaggtatatgcacagttttaaagtaaggagagggataggtaagagtgaagtgtgaaattaagagcacacgaagaaggcatccgaaaagctgtgtggttcttgacacgtacctcacactcaatactggagggtgatgatggtgaaagaacgtgtagctggatggatagggagatggatggtagatgatggatggatggataaatgatggataggtgggtagatgggtatgggggaatggatggtagacggatgatggacagatggatggatgggtagatggaggaataggtaggtggaagatggatagtggatgaattggtgagtgggtggatgggtggatagataggtgggtaggtggaggagtgggtggatgacagattgatgggtagatgaatgaatagatggatggatggatagatgaaatggtgtgtaggtgatggacagatgtatggatggatggaaaggtgggtggatagataggtgggtaggtggaggagtgggtggatgacagattgatgggtagatgaatgaatagatggatggatggatagatgaaatggtgtgtaggtgatggacagatgtatggatggatggaaaggtgggtggatagatagatggaaggatcagtggacagattggtgagtggatggataggtggagagatgggtaggtggacgaatgggtaggtgatagattgatagacagatggattgatggatgagtggatgggtggctggaggatggatgagaggatggatgcatggatggatggatgggtggatggattggtgagtggatggatgagtagatggattggtgagtggatggatgagtagatggattggtgggtggatggataaatgtgtagatgaatggatgaatggtgggaggaagaggagtgcatgaataaataactgggtaggacggtaaacgttgatgagttgatgagaagacaatgggctttggagatcaaatcttgccttggctaattactgtctttctgaccctagccaagtcactcgcttctctaagcactccttcactcacctgaaaagtaagactaataatatctacctcattgccttgttagaagcttcaagttagataacatatgtaaaaggttttataacatgtaaaatgctgtatggacacttaatagggtcataactaatactaaccacagggctttgtcatctctgtcaactaaaaaacatggatgatcccacattttttttttggtagatacggggtctcattatgttgtccagcctggtctcaaactcttgacctcaagccattctcctgcctcagcctcccaaagcactgggattacaggtgtgagccaccacgcctggccaataccacatttttgatgtggcagcttctgaggcaaagatgaggaaacaaagatggcgccacaggtcagggctgcagctgtctagactatacctccaggtgtggcctcagctgggaaactggtcactgtgcaggaagcagagagcctcacttgcctcctccgctcaaacactcaaacccaaatgagtagaacacattccacaactcccaccacaagccccacttctctctgccagtatcctactttaatgcccaggtcccaagcctgtattcaagtctacaaaatggtgagagtcaagagcatttctagtggcccctagaatgttgcagaggcagcaatggttgcagaggcaccaatgagataataattgcaaactgtgaagtgtttcaacggggttacaaactcacagtgcaagttggtaataagccaggtaaggaaggccagttgtgggctgtgttgaaccaggaagcacatcccagtatccaaaggggtcacacagaaatgtcggccaggggctgccaggcctgatttatagaaaaatcaataaatccagccatttagtgtggtggtgaagaggacagaagccggggctggtggcctgggtccagcattaaccagctctgaggccttggggggttagttgacctctctgtgcctcattttgcttgtcttcatattagaggcattgtgaggatcaaatgtttttatgcctaccagtgctaagaacaatgccgggcactcaaaaagcactagctaaatgactctttatgatgatggaaattctctgttttaaaacacagacaaccagctaggcgcatggctcatgcctgtaatcccagcactttggaaggccaaggcagtaaaattgcttgaggccaggagttctagaccagcctaggcagcatagtgaaccctatctttacaaaaaataaaaacgttagctgggtatagtggtgtgcacctgtagtcccagctactcaggaggctgaggtgggagtactgcttgaacccaggagttcaaggctgcagagagctatgatcacaccattgcactgcagcctgagcaagattctctttcttaaaaaaaaaaaaaaaaaaaaaaaagtgaaaatagaatatagagaaccctctaaaagttccacaatccccaggccatggactgtgagttttcaccctctgctctataaaagtgttcaatgttataaaaacagtgacttctccttgtgcgtcccttctcccctatgtgaggagagaccgggttagattgttctggatgctcctgaagtcagggagggcaggggcaggcatggttccttatcctactggaaatcccctccctgccctagacaattttagcatcttgctcctcaccttccaccacgcttcccaccaacgctgtattttatttaccctagaaccccaaagagcataagatgctccagtattttatgtatcacaacaaacaaaaaatatgaccaattaaactacagcacacaaatgaggtattgcaacttaatgtaagagaggctctaaggaggaaagctgtgtatcttaaaatacaaccgtgaaataaggcaacagctcccgtatactgagctcctaccatgtgtcagaaactggactctctgctctttatatattatctttacttctcccagttgttcccgtttgaccgatgaagaaattgaggctcagaaaagcaaagtggctcgctaagtcgtctagctggtaagaggtggtacatagattttagcccaaatggccctgtcctaggatgactacctccttccctctcactgtcccctgccactcccatccctgctgtcccctgggacgcctaaaggagacaccaaactgaaactgtcactttcccttgctcatattgcagccacacagtgaatctcaatgcagccccggacaagccccagtccgtccatgattgattctgtctaaacttcagaagcagaatgagtggagccacattattgacacagcaaaattaattttctgccatctcctcttccccatgcccggcccccagcacctcgcctctcctatgagtattggcgcacggctgctgacgggtgctcctgaaatgccaacttgcatttctcatcattaatttctttgtaaatgtcattagtaattgttcctgcttgaccaaagagtacaatccaggcttccacccagagcaccctggtctctcgttgatgggggctaagacatccccagccatgccagaccccagcctcctgatgcaggcagccatccccgctcccaataagtcaggatcacaggctgctgtatcaagaaagttctgacacaaatggagttcagtaacacaaaacatcctgcccttggtgttaggacaatggttgtatgttcaggctgcctgggttcaaatctcatctctgcccaactatgcctcagtctccccacctgtgaaacggggataacagcagcactggcttcataggtttgccctcagaatgggaaaaaaatcaaggcaaaaggattcccttagtgcctggttggtggtggtgctaccatcgtccttcaccttgcctcttaccaccagggttgcaggttcagctctgccacttaccagccgtgggacacgacatcaagcgagtggcttaaactcgctgttgagcctgcttctcccatctgtgaaagagggacagtgatatccacatcaactctgccaattccacctcagatgttgcctcctccatgtggccttcctaggggaccaggcaccatgctcgatgatctacaagcatgatgctgcatccccacagtaaccctccaagaggggcactggcagcccactgtccaggtgacgacaatgagtcaccgtgagggaggtcacatgcccaaggtcacattgacaaagcaactctgaggcccccaaacctcatttctggggggtggacgttgactgtgctccttgtccctagaaggcccaggacacaggcctgaacccttcgccgcaaagcagtaaaaatgaggcagtgcttcctgagtgctgctagggacctcacagcaagcccttcccgtgagtagcttcttacgacctcacatgagtgtgtctccttgttgtaaatgggtaaactgagactccccatgtgggcagagctgccaggaaagcagagctatgagcccaggtggtctgacaggagtgtctgtgtctgtgtctatgtctggggtcttcccctcaggccccaaggccccatgtcttcccgtgtgagaggctccctctttgtctgagtcaatgcggggcagggcttacagggtgcaaacctctgtggatgtggagccggtgaggcgccgccactcgcagtgttgtcactgttactaagaaactgaaggcatgtggtcccggctgaggcagcgccggggaggggttcggctcgccacacacacaatggccaccggcctgaggctcctggcagctcccccgtgcccatctgtcgagatggcatggtgccctctaaagttggttggccccctgccctagggcatgaatgacaggctccaatgggcagacgggcagccggaggctgattccaagtgccatctctgcctggagctgggccttgaggggaggccccccagtccccacctgggcctccacacacttcattgctcaggcgagctgaccctcaaggctcacgagggtatctgagcacagctggacacagacttctgtttcaacactacccctccggtgcccgctcctcactgcgcctctgtggtgaccagggagaagccattgctcacccagggctgtccagaccagcgacagtatcatgccccgggagctgcatgcagcctccatgtcaccctctagaacgcctgcctcgctgggaggtgaggcccacttcgagaccctgcacccagagacctacccttggcttctaagggctttgagagtcatctccaaccccactgcctcagcccgcaggctgcgaacacaggcactcatgtcagactgcctggcctcacatttctccacgctggcagctatgtccacatggggagcctcagtttacccatctatgacatggacctcatgcgtgaggtcctaagaggctacccacatgaagggcttacagtcaggttcccagtaagcactcaggaaatgctgtctcatttgtactactttggggtgaggggctcaggcctgtgccttgggccttctaaggacaaggagtgttgtcagtgtccaccccagacttctcccaaggcagaccacaaactgccacacatggcccctcaggagacacagctgcctccagtagtggcagcaataataatcatgtcaatgacaacagtgatgatgatgatgatgatgccacaccttattaggttgggaacacccttgccccacttgacagtaaataaaccaaggcttagagacacagaccaactgtgctcgtaacacagtaacttacagggagcaagggcaaagctcaggctccacagtgccccttaatgtcacatgggggcccaactgtggggctctgttttgtgtagcacttatgttgtatttagtatgtagtatgagtgatatggtatgatgcagcactatactatactatactatatactataccatattacatcacattatattatattccacaaacacataacaaaaattctgtttgtccttattagcttactttcccctccctgcaacatgtgaggggcttagtctatgcctctgtttgtccccagcacctatgcacagctggcacagatcaggtgcttagtaaacacttgcaggctagattgagcacgtccacacatgattgattgaatgagtcaatgaacgcattaacagaaagcccaccacctccagaccacaggcagggcaatgactagggctcaccaacctttgactctgacccagacccaatgctgggagcttttcaggcatcactgccttcagctaccccagtaccaaacaaagaagggctcttcaataaccctggtctcttgaaagcaagagaatgccggtgacttgcttatggtcatggagctgcttggtggcagggctggcatctgaggccagactgtgagctccacagcatgggcatggcatcgccacaacatgtggtcacattcagtagaattcaggctgtgctgggctctggtttcctaccctagtggggaaggcaggaagcataaagtgatcctattggaaaagggccacaatgaccctcagcaatccttctatcctaagtgctataaagtgctttacacatgcgaactccatcttcacaacaacccgaggcagcaggtcttaccccatttaacagatgtggaaactgagcccagagaaatacaacatctgcagtaggaaataatgggcggctgggcacggtggcccatacatgtaatcccagcactttgagaggccgaggcaagtgggtcacttgaggtcagaagtttgagaccagcctcgccaacatggtgaaacccctgtctctcctaaaaatacaaaattagccaggcatggtggtgggcacctgtaatcccagctactcgggaggctgaagcaggagaatcacttgaacccgggaggcggagattgcagtgagccgagatcgtgttactgcacactccagactgggtgaccgagtgagactctgtctcaaaaaaataaaaaagaaaataatggggattgggagacttcggggggtcagcagccagcccaactctcagccctccccaggctcctggcctcacaagtggctgactccagcgtgagcaacaggttctcactccctggaaccaccactgggtgtcagccagcaacttcaggccacacccatctgggccctggtctcccagcagaagtcaggttgacaaggatggggccatctctaaagcaggaaggaggaagatgccgctactcacagaaagcgcagccagagtcaaatgctaagtatgtgcctagagcacttttgatttttaattattattagttataattatctggctggatccaacagcagcagtacaaagagacaaggaaactggctctttggttacccatcttataaggaccagggattttaaaaatgggctcccggaatctgtgggtttccccttcttccttttcctcctttcctgcttgtgttctctttccgactttccaggagctcaaaaaatatgttaacacatatggggatggatggatggatggatggatggatggatggatggatggacggacggatggcaaagggtgtcttcactctccaaaaactcacgtcagagtggagagtttggtgtagacgtagtgacttacaatccatatggccaacggaatcaggggggttaaaccaagggctggagaaaccaaaggaaggagaatccgagaggcttctcaggggaggaggcactggagctgggctgatgcattaagagaaagaaagggtacttcctgcaggcagataggcaggtgtacgtgcatctaggaagccccatcttgatctcactgggtaggcgatgcgaggccagcccaggagaataatgcaggaaggcagtggccgtctgtcctgcttgcccctctagtccctctgcctttttattctgttctgagaacaccccaaatctgcttgggcctcagatacttggtactggctcttccctctcctggaggatcccccagctcttccccacactggctctgcaacctccaggattgagctgaaatgccagcctttcctgaccacccaacacacacacacacacacacacacacatgcacacgcacatgcgtacacacacacgcacacgcacacacacacacacatgcacatacacacaccactctccatcacagtacagcgttttcacattctgaaatcccctagttcatgtatttactgacttatcatcagtgtctcccaaagcatgtcagctccatgagaatagaaaccctgtctccttgttcccagttctgtctcaggctcctgaggtggtgccgggagtaggtactcagtaaatggaatcagggcaagggctgaatcaaatgttctcaagggctaggaaggaagggtcccaagggagctgagatcccgcccctgtctcagagagctctccctctggccgggtaccaggaccctgcctggcagagcccggctcaccctatcgaaagggctccgggttgcttgttagaatacctagctctgcttttaatcaattgtaatcatttagctggaagcagcatgattaggcacacacaagcaaacagcatgagctaatcctttaaatgcgcccgctcaacgctgggctggccgctttgccaccgcgggcccggctcacggaatcacttcctgcagcccctggctttgtcaatgagggagtcaagattccagggcgtggcgctggtccaacaccccaaaaccatcttcatcaaggacatgtgcatgtgtgcgtgcacacatacacgcgctgtgaactctgacatgccctggcaggcagtgccccacagctccaagatcccagaagttctatgtctaaaaagacatctctctagttcaagttctattcccccatgacaggaccaagcaagtcataaaggggagaaaggtggcagcaccatgaacctgaggtcttaggaagtccctatctccgtgacgagaatgaatccttcctctccccaagcccagcctaagccaaacccatcctgatgctcatttgcaagcaacagggtttgcagggtcctggcctcgagctgcagcctggcaaacgtggccatgcacagccctggccccgcgcgcacaggccccatggcgttcccacctgggctcacccaggagcaatttttcttgcatcccctgttactgctacttgtgctacctgcttggcccaactactaaaatagtttctgggtcccctgacaacgaaagctttttatagttcagcactgcaggcctcatttaaatctattagctcatataaatggcaatttatttaaactttggagggtttctgtttgccttggtggcaaagacaatccagctttatgtgtggctctgccatttgcaaatgaccctcggcaaaccgcttaacttctcagagcctcagtttctgtatctgtaaatggggatgagagtaccttgttcatagggctgtacacaatccatgcaaagtgctcagaacagagcctggcccgcagcacagacctagggcccaggggtgaaggccatgagaattgtctctggtacaatttcaggggagcttgtccactgtctaactccagccctgtatggctggtaagccgcatatgaccctcatgcacgcatccccacagtgaggatgaagaacaggaagcagcaaggctcttaggatggggagatggaggcaccatccgtgcccagtgtctgtgggcacagaggtgcccatggggatgcagagacagctgggctggtgggcagaggcgacccctcccctcagggtggctaaccgctggcatggggccgatagggccccaggccttcatctgctgaggcctgaggctgggaatgcaaggccaacagctctgacatttgcgggctgtcttgcacccccagtcaaatctacataccaccctccacggcgcccggacgtggctcagaaatagagggtcctaagaaaagagcccaggtcaaaggcgctcagagaagtaggggaagggggacccgaagccccggccctctggcctccattccatgccctttatgccccgtctcactgccctgggcacctggctcctcccaatgccccaatgtggggtctcctgtgcccacagccctgaggcttggtgggatgccacacaaggaaggacttggagtctcactttgttcaaactcaggctggaaaccatgaaagcaaagcaaactccaaggagagggaatccccaaagccatctgatcctcaaactgcccagaagtcaatgtcaataataatcacaggcagcgtctgctacatgctctgtgtgccagccactgtgccaagggccttttgcaactgaactcttaagtaggaactactcacacccctgccttacaggtaaggaaactgaggcttacggctggtgcatgacagagcaaggttttaaatacggagctgccctcacaaagactgggccgctccctgcttcactcttggcagcatttcagacacgtgcattgtttgcacacttctaccgacagggacctcagcactttccatttctggacagttttcccgcatactgcaaatgctcagtgtccatccaggtcatgcaccccttccctgaaaagcaccctgaacttgctggtttgtatcatatgatcctacccccagccacagctcactggagcagggtggacagctgacccaggctcacctaccagattccccctccagggatctagcacctgttgcctgagggctggctgccaccgctgtcactatctctggggtttcctgggtgttccttctggctacctgtgtcaccaatcctcacactaaatcctctctgttgagctacctagggtgtctgtcttagcagaattgacaggagctgtggaaccttgaccaccttcctccttgtacagaggagcccagaaagtcaggctgtagagagagaggacaataaaagccagaaagaggcagaaggcagggaccaggcagtcttagagaagacagagtgtagctgccttatttaagtgacacttggctccgggaatagggctgccaaaaacccaacattgcttcctgctcttagcatccaaaatccactcatgtccctacagcttaatttcccttctagcttgcgccaactgcagagagtgatgcctgagccatgactatccaggaccaaaacccctgttctgagttggcgcccactgccaaaagtcttggagccacctgaagcaataagaacccctccaggacccagagttcttaaaatgctcgaagacaactgtccctgcatttcttctgcaatccatccaagtcttctcctggttaaacagacttaggacagactcctggaagcacctcgaggtcagactggatcccctactgcctgggttttcaaggtgtggggtgagcgtgggcaggtgtatatgtgggtgagggtacaggtatatggacaaagcttagtctcccctatttctttttctcttgctttcaagtcataggatttattttgttttgtgaaattgaaagctttaagccataacaaaatgagagaaaactttttttttttcattgttagatcaggccagttaatggtgagtttcttggtaatatcctttctccaccctatggcttcgaagttatcacttgggctactttaactctgtgactcgttgttgttcctgctgctgtcttctgagatagatatgctgcttactgttcccgctttgctccaaaatctcttcattttattccatttaagactaacaatagcaattaaaatgagcaaaggtaaaaaagaaatgtagaaactgatcaaaagaccattgtttttaggagcagcacgtcgttttggaaacaaggtacacttttttctaccgtaagctaaaatccatcattaacacttcctcctggtgatgatattggcggctcacaatctggaggagcataaccaggatcacactgacaatggaaaagttcattgcaagccctattctctctgcaatttatgttatatcttgttatatttatgtcactaagatatttgcatccttggaatctacataacctgtgttgaccacatgcacttgtagcttctgcataggtcccccattattttgaaccatttcttgcatgtgcagacaaacatacatgacccccaaggtaagtatattgtatatcaaagtctgtcattgatactgtttctgaatgtgtccagtgacaatctttccacaaagaatatcataaaaatgacaacgggaaccacagtttccaaatttgtcatttagaaaattcactttttctgtacacagaacactagcagacttagaaaattttccaaataactgtgcgcactgtctgtccctatctctgcattctcctttaaagcaatatctagtcttattgctgcagtattctaaatcagcagctttcacatcagttacacaaaactcagatgttccattgcaaaaaaaaaaaaaagtctcccctatttcttccctgcaactccgaccttcagccactgacaactactggtctgttttctatggcgatatatttttacctttttccagaatgtcatgtcaataaaaccatacagcatggaaccttttgagtatggcttttgtcatgtgacatttgagatttatccatggcaccagggacagtggctcacgcctgtaatcccaacactctgggaagccaaggcgggaggattgcttgagcccaggagtttgagaccagcctgggcagtatcatgagaccccacctataaaattaaaagttaaaattaaaaaattagctgggtgtggtggtgtgcacctatagtcccagccactcaggaagctgaggtgaaaggatgacatgagccccggaggttgaggctgcagtaagccatgatcacactcctgcactccagcctgggtgacagagccagaccctgtcacttaaaaaacaaaacaagattcattcacattgtaacatgtatctgcagttgccttttactgctgagaatgtacacatgacctgtaccaatgtaacacatgaccccatctgttacccatcctccaaataagggacaacgagcaggcctccggtttggggccatgacaaagctgttatcatcattcatgtagaggtattggtgtgagtgtaaattttcctttttttcttgggtaaacactaagagtgggattactgggtctaacggtaaatgaacgtttaactttataagaaactgacaaatattttgtcacatggccataccatcttgcactgccaccagcaatgtgtgaaagttcctatcccgccctcaccaactctcagcattgtgagtttttcatttatgtgggtggcatcaggctatggttttcacttgcccttccctaatgactaatgatgttcattttctttggtgagacatctgccaaaagatttttgctcattttttagttgttctgtgtcccgtctcattatggagttttgagagttcttcatatagtctggatacaagtgctttattcgatatgtgatttgcaaatattttctcccaatcagtgacttttcattctcttaaccatgtctttcaaaagcaaacttcttacattttgattcagggtgtaaatcagataatatctgtcccctgcttggtttcccatcatgatggagataaaatccaaagtccttcactgtcctgaaaaccttgccatgatctgggctccactgcctctgccccaattcactgtgcttcagctgcactctgccttctgtcatcctagccctggcacccagtggccacagggcctttgcactcacggctctcttccacacaatactgccttcatgccatcgggcctcagcttgcatgccacctcctcggggaggccctccctgaccacacttaccaaggagtgtctgacttcaacctcccagcatgctctagcccattatttggttttatttttttcatgtcattggctcttattggaaagtgcccatcaatcccctagaatgcagaccccgtgggtatttcttcatcttttcaccactgtcttctcaggtgctagaaacagggcctggcacatcatgggccctccacatacttgcttcaaacaaatgaataggaaagctagttccctctcatgttcctaattattcggttgtgaatttgcaacagtttgtctaaactcctttgaattaatctcagtcttttgggcagagccctccgaacttggaatcaaagaggactcacacctcccttatactggcaactgtgctcctgttaacgcaacctaagaaaacattacgtttggagggagacatgtcaatgttgacagagaccaagcctgtcatggttcagttctacctcctaaacttctattcctgcagcagcacttcctggtcctgcagtgagctcaatcctaagcctagaatcttctcaagacctctcagcccatagtcccttgtgcctgcaaataccaggtgcctggaatttccgtgcataacctcaaactacacaaggccacaagaaaccagcaaggatagaactccagctggccttgcctcccactgccccacccaaacccccagctcattccaagaaacaacagcacacttgcctgttccacccaaccagggccttccagccccagcttctgtgtagggacaatgaacactccaatgcctgaaaaaccctcctctcaaaaacgagaaaattgctattcaagttacttaacgagagccattatttgcatagatttggcattgcaacaacacttccgtatttaaacggtctataattaaaatcattaattgcagaaaatagtgactcgttaaggctgtaatttagcggtttctcagtatttgaggatctgacttaaagcttaacgggatgacccaggaaaccaccagctcacatgaaccgctctcaggtcaagtgtggcccacagctcgagataggtgggatcgaagcaagatccagattgaaagcagcagcctccctccacctctgcacttatgagctaggcccccagcccagtgacaccaatgaagctcaaaaacgtcaggatgggaaaccttctctgggaataatcttgaggccatcagagaagagacctcttggcatttgggacaatgcaggcgagccaggcaggagctgagcaagttcaaagtgtaaataaatcgtagtttatatgcactcacgggtttaaaagaggcctgacctgttgggctatagaaagcctcctctgtcaggatacccaggcctattttggtagctgggccactcaggtaaggcaggtaggataaggcggctgcatggactgcacttgggagagggtgcgcatccagcacacgagcagggaggcttcttggatggcatcaacgcctagctgtcgccccacacatcctaagcacagagacatcagctcagtttgtggatcaatggggagacagcagtggcatggtaagggtcactagctcagtggtggccttttggaagtggaaccccctctctgggccaggtctgtatgattggtttcataactctgtcccacgttgtgacaatgggataaaggcctcatgtacaatacacaaatttatgagcaccgtaaggatgaaaagaaacaggctttccaccacaccagctgggtgctcctcggggccagccctgagctcagcctacctagccctggcatggggccagcctatggaaacaggacttgaccatctaatggtgaatccccccggtccccacaccctccaagggcctgtttgcatatcctccaggcaacagccaccaccagctgtgcagacaggcgggcccaggcctggcagtgtgggtgggccacagcacagtaagaagggggccccctacaacaggccacagctgtgcccctctaaccccagagggggaggcaccactgtggccattcaagtgactctgcatggtgtaagtggccccagccttgtaacctgggtatgtgggagattgctgcatgcaggtgcagcagtggcatggggatgagggagggtgctgctgggtgtgtagggtcccccctggagggccaaactggtgtgtgtgagtccttagggctcccttctccttccaggcagagggtggaattccctgcctcacccgctttgaggttgggcatgcccgcgggacttactctagtcaacacaatgtgagagaaggtggcgtgcatcatttccgaggggaagcttgaagtgctggtagagaagtcaccacctccctcttctccctgcctcagtgactacggaaacgtggatgggcatggaccctccgtgggcctgggtcactaagtgaatattatgaacagagtctcttccccatcacctgcttggatatgtcacatgggcaacaaataaaccttttgttgaggacacagagaccgagaggaggtttgttattgcagcctaacctacccatatccttcccgacaggctcattcttggtatgtgacatttcggcatgtccgtctatgtgtatgtgtgatatatctgtggacatgagtgtggtccttcttttgggggtgcagtgttgtgctgcatgtgtgcggtattcctcagggtggatgcagtgttactctttgtgacatctctgggcatatacactgtgataggaactgtgtgcgtgcaccttccctttgtgtgtgtgatgctatggtccaggtacagtgaatgtgagatttttctgtgtacgtgtgttgtatttctggtgggcatgtgatctctccagtgttgcaagaattttttgcaaaaaccagtgggagagaaagcagtttcacttgggcacagatcttgttccttggaaaaaccagtaacaggtgaaatggggccccatgggattccaaggcaggtggctgtgaatgcctgggaagaccgtcacaccagcttcctttcccaaggtcctctcagttaccacaggctggggatgaggatgcaaggaagttggctgaggcccctgtcccttacctgagggccacatcagtctcaggacctctggtgactgcctctaagctggggcaatcgggcaccactactcttcttttctggcttttatggacaaaactggaggctccaaggccccagacctaactcctgttcccacacagccccaggacccagccacaaagacatcatgggcttctagccacagaaccaaagctcagtgaaatatcattttacaatagaggtagggaaattggaatccccaagagcagacaggacttgccacgaaacacctcaaatgtaagcttctgactcctgctctgggctcagccagtggcagttggttcttttgagaacgctgggctggcagaggccagggggctgaaactccatgcctgctagccaggaggtcagcccctgattgcagacctgccagcataagactccaccagcttgccttaaccctgagaccgtcggtgctgacgggggaaccgaggaccatcaggcggcgtggtgcagcggatgtgggcacccacctgcagctcggtctggaagaagaacttctgagggcactgtgagcagtcgtagatcttgtcctcctgcccgtgcacggcaaagatgtgctgctgcaacttgttggcctggacgaagactagacacagacacggctgtcagggccaagctcaggacaccagcccagcctcctgtggcagctgcccccacaacactcgcaggcagggatcactgtggcataggtacagtcagccaaacagtgggctactgggagtgttcttagcacatactagaggaggctcaagttagataagctgagctccggtacttagtggctgtgcaaccctgggtaagtcacttaacctctctgggctccatttcctcactcaaaaaatgaagattataatatgtccctagctgggtggctgggaggatcaaatgggatattgataaagtgcttaaaagatggcctgccacagacaaatgaatgctgtcttcctcgtccccatcatcaacagccagacacctacaggggtgagcttcttgaacccctcccaggcctgtaggacaggtgctattatccccattttatacaagagaaaactgaggtgccaggaatgttaaatggcttgtccaaggtcccactgctagcaagtggcagagcctagacttgaattaaataagctcagcacagggtcttgtacaagaagttgctcaaccaacacaaattcctatttttattgttgtcagcatcctcgggcccccacacagaggcccccatgtcctgggttggcagacgggcagctggggcccttcagtgccagcctcagagtgtggcagtgacagatgggtgggggctcctgcgatgagggggaagatggcatcagggtgctcaggggctctggggagccccaggggtgtgtgtttgggggatttgccccagagtggacacccctgggcctggcatggagaaggtctagccctggcttcccagtggcaggagttctgaggtggccccagccctgagcgcacccaggaggtggcccagagcagctgtgtgtctgggaggtgagcacttcagagataccctcctgccaggcgtcctccccagggtgggcttcctgccgtggcagacagcagatgtcgggggaggcagggaaggccaggctctcccacgcacaccggctgccatctgggcagcaggagggggccggcagagcccctgagacttgcctcgggctgggacagccattcgcctgggccggcagccagtctgggggctgggaacttggccggcagagctgcccttgacccctgcatcctggagcatggatgggagctaggtaggccagggaagggggaaccaggagtatgtgaagctgggagccccagaagtgctgaatagagctcaaggctcggggagacaaacacagggcccgggaggggaaaactgccgcagagggttgaggctgggttggacaaagggcttctagctcctgtgtgcagagggcgaggagagggtgccaaccagcctgctgatgaggagaggccagagagcactgaaggagggcgcgtgtcagctctgaactgagggacgtggggcaaagggcctgttaatccctcagggtatccccaacggagtcctggtctataacaggcctgccaaggaaagaggaagagcacacactgggatcccgcaataacagggcagggctcctgtgttcatctctctcccctgaggggcacaagctgggtaccttacctgtgaaacacacggggcatttgaaggtgccgcccatgccctcgaagctgtgctcaatgaggtgacagaggagcttggccggggagtcgaacatctggttgcacagcttacactcgtggttgatgccttcctctgcaaggaaaacccgtgaccagtcagtgaccagcatgccatgtcccccagacaggtgctcacaaggcctcccatagaccccagcactaacccccctccaatccccagcaccggggctggtgaagggactgcagacaccaagactcatcctggctccacatggcctcacccctagaggcttacagaccccagaggaccggctccaaatatgtggcccttggaggtgccatttgctgtgatttctcctgctgatcaagcagccaggtgtgcaggccatggtcaacagcttgagtcccaagactgggtcactgtgcagaggcacccaggatgaggtacaggatggagaaggtggtccaaccaggattttaaaaaatccaatcaaatatttattgagcatgtactatgtgccaggtactttgctctaaggattatttaggcaactaaacaaataatgtctctgcccccactctggtggtggggtagacagatgataaacaaaatcatcagcacataatgcagtgtcaggaggtgatgtgaatacatggcgagagcactctaggagaggggtgggggcagggccctgaggtgggtccatgccatgctggacaggcttgaagcccagcatgggaacacagtgcctgagctcagagggccaagagtgaggtcagagaggccacagggatgcacaagaaaagccctgtcagcccctggaggactttggaattttacttcgagactgacgggcagcatggaagatactgcaccaaacgctctttttatttgcttttcttttaaacaaatggtctatgcagtggatgatggacaacaggcaaactcgccatcctgcttcagaccagaacacagctcctccatctccccacctgggagccgctgagaccccaaaccttcacccaaaggcgccgggggacacagagtgcctgagcaccagccttgccaatgtcgaggaggctcagagctctggtgccctcactcacaatcaagcagcagcaggttcaaattctggctcctcagccccacacagcatgctgtgggcacaagctcatgtgcagtaagatggggaccacctgtcctccctgcttcccgggctgcaggaggacagaggggcccaggggtcagtggtggggatggggaatcccctggtttgagcttcacatcacctggggttggaatccgtccctccccttactgggtgatcttaggcaagtcacacaacctctctgtacctcagtttcctctgtctgaaacactccataacagcttttctgttatagttgctatgagaattaaatgagctaatacatgcacaggggtctggaacagaccctggcacacagcaagtgctcaataagtgtttactgccaggcatgtcagtgttggtgagagtattatctgggacagccaaggacacgggttcccctttgggctcccccagggaaccagcctcactgaaggcgccaggtgctctgatttgcccttaaaggcaagaattaggtagcagaggggttctgctggtggcaagacatgaacacagatgggctgaggctcctggcgagtccctgggtccctaggccctggcaggggctggcagagacagcaggcattccccctggcccagccatcccccgcacccccgggcaccccaccgcagaggcgcacacacacacgtgcacacacaggtgggtctgccccacatagcccactggctggaatctaccgggtgtttgtcatgcccctggagccctggcaactaggccacatacacccgacagagactcaaacagatcttccatttatactagcagaaaaggaattcattgacaagttttgggacacagggcaggctcagcacgctcgccctgcaggccccacgcacgtcctccacctcccttggggagacgttcatcataattagagatggcctccagtgtggggggctgcctcaaaagaccccccaatgcatcccctgccccctgcacaaacaacattgcccagtgcctggcacagggtgtaggatcaaggaaagaaagagactccacccttacatgtgaccttattagaatgaggacaccccgtggacattaaggagggagggggtatgtgaggttgacaactgtgcagagttttctgtaagaatagtttataacatatttcaatctcagaaataacccagcttacttggaaaactgcatttctgggaagaagaaatgggttcggagaattagaccatttactcaagtaacacagccagatgggggcggtgcagaagaggatacaaaacctttcctatatgcatgtacccccgccatcgtacaccaccgccaggcagcctgccctgacttgtacccctcattgtacatgacctccaggcagcctgccctgactattccagttcatgagcacacacacgtgtgcatgcacacacacacacacgactactccctcactaggcacaatgacccttgattcatgtaaccatgtgagattttctgggcttgcctgcaggaggggcttggaaatactcacagaggagagacgtccccaggctgggccctctctccctgcccagctaggggctctgggggctgagacggcaaacaggatttaccgctctctgccgagcgggggcctttaaccacttggctgtgaatggcgacgggcccatctgatacacaaacaccgagaggacaaagaagcctcctgcaacttataaatcagagaaatcatgtctgacagtcactttccgttctccgagtgccgagcaattcatcagctggtcccccctgattcatagccgcagctacacccagcgcccatgttcataaatatgtgcacagtcaggcagccctggagctgcaagccgtccggggcccaaacggctaccatttaagcagatcacagccccaaaccagtgtcaaagtaaggttccaggctaattagatcaagagcccaacagaccactgtgtgtctcgggaccctttcctctctctcccccaagtgttttaagagagtcaaacctggggaaagaggggaggagaaataaaacaagcaaaaagtgaaagtgaagggaggggatggaataaagcctgaagggttcccgcagagctgggactcgctcccactcaaggcaagaccttttgatttgcaaatctttctgaagacgaggccttctccccactggaggggttagaggtactcccttgggtgtccattacgtgtatctctgcctatgaaaccatccaggaaaacagggggagggccggggaggtggagagggcggggaggggctgccctagttagtgtgacaaacactcctttgcgtgctggtgacccaatgtgagccagcccatggatattgatagaatttgctagcaccatcactctcaccccgcaggcgctgacaacctctcgttccaccccaagatgcagggtccgccgatagtggcaccctccgagaatcactttcctgaattatataagatcgcacagtgctcggccgacaccttggagcagaatgacaaagctgtctgggagcctgcaggcccctccaccccagcgtggggactggaggattttgtgagttaagacgcacaattgcttcccttccttttctgtgccttttttttttttaatagcacatgacaggcatccataagacagacccacacaactcaagtgaattatgcagccccgctcatttgtaaagtgaaatgcagatttcacctgctgaaattcagatcttgcctcctgttccccataagtcgaggctggcacaaggaaatctattgatttattatgattaaaaaaaataaaaataaataaaaactcaaactgccaaacaaacaacccgccaagcaggaaaatcccaaagtccctgtctctcctttctccctcctctgctcaggaataagtgttaattttacacttcatttctcaaaaaaataataggatgtgcttttgcttaaaaccaagtcagcctgctggaacctttcaggctgaaactgtgtcagcccaaaagaggagcagagggctttgtggaagagcatcgtgccgagatgatagctccctgtaatgtccctggtaccgacttttgtctccaaaagcatttgatccctggcagacacatacttatttccatacgggtcttgggggaagccaggaggagagagagctgattatcagaatcctgaaggtgaagctcaggtgggccccactgatgtcaaaggcaggcctgggcacacattcggaggccataatttgctgcctgggagggaggagcggcgggctgcagcggggtgtggacggggcattgttctcgggctctggtgcactgagcgtgacctgctccagccacaacggatagtccctgcctaccccctctcttagcaggaacccccctcgggaaagctgaccccagagtggcatcattaatgcacacacctgtctaggagaagaccaatgacttccgcctggtgttgactaggggcatgactagccacctacatccaggatgtggcaatgaaggacacaaaagctagagccgggaacacttgggtttgagccctagttccaccactcactcgctgtgtggactggagtaagttactttgcctctctgagcttctgcttctgccactagaaaataggcagagtcattacggggcttttgtatggcagccaagcagtcttatttggccacaggacatctgcccttgctgagacccccagaccatcccacactccttccctcactacactcaggggtctgcctaaaggacacctcctcagggaggccttactcgagacccccatctaacacagcacacacccccgtcctttccagcacctggcccacctttaattcctggatagcgcttactaccacctggtatattacagggttcattgtttaattcattctcattccctccgtccctccctccctccggcacacagacagagtaacataaactccatgagggctgctttgcccactgctatgtcaccagtgcctagaacaggatctggcaccaggagacgcttgacgagcaggaaatgaatgatttatgtaaagcacttagcacagagtttgcggtagggtgggagtgctggtaaatgccatcactatgcacccatggtcacccctaatctcacaggactcggcttgtaaaaacctcaactccagtaacgctttctggaaccccacggaacaacagcctgctccaagactgagggcgtggagaggctccctcagctgacagaagaggaagggacgcttagagaggcagggcccctaacagggatgtggcagggcagagcagggcagagcggggcagcagcagccctgctgttcacccccagcagccctctctggctttagaaaattcaagaaacagccacaagacctaaaacctgggacccagcaagccacccctgctccctgatcacccaaaaaaatcctggtcagaaggaagacagagccgccctccgcatctccatgtttgagcctggggggtcccctcgccagcacaagcgccggttggcagcagggctggggctttccctgaggaaggggaggaggtagccctgcatgtgacagcgtgggacagtccaggctgcacctcctctctccaagagtgtgtctgcaggtggaagcaaggcagggaatacacaggctgcttggccaagctgcggcccctccactaccagccccagaaataaatgccccagactgacattccacagcaccagggacagcctgcggcctgcgcatctagtatcaggtcaagtcctgaggtcctggggctcagacacacacactgtaaatgggcgcggtaaatggtccttggagagaggaagcatgggagcaaaggccccagcactcatccaggcaaatcttgccaggaggcaagagggtgaggtgagggtgaccccaggagaggacccctccgacaccatccccatagataaccacaaatagcgcagaacaggagctaggaacctgagctgtgggagactctgtcctttgtttcctgtaagaaacaaagacccccaggcagaaagaggagggcaggtgataatatctgggcagccagattgggccgtttatctattgatctgtcattaaatgccatgaagaaattaaccagtccaggctgaagggaaggagagagtgacatttaggctgggagtcaaccagggtcataggagaactcagggtctgaggagtgtcccttgtcaaaggctgggcaagagctgggagcaggtgagtggtgatggaggatgaccatgggagccccaacacccccagctctggcagcccacgggaacccacttccctgccaagcagcccgggcagcacctgggagcttgagagaaatgcagagtctcaggcctgccccagagctgcagcattttaaaggtgcccccgtgtttggggcgtccattaacgcttgagaaccactgagcgcgatacaaggggcttagggacgctgatattgttggaatcctgctgtcccgaagctgggtttgggagctgtcccactgctttgaccaatattctatgtggaaggatctcttaaaaggcaggaagttttctagtcactttttgtccacattttgcaaaagactgaaaaatcgtcagcaatgaaaaatatttcctgtggttactcctgggatggaaatgatgcgagtatatctttgaagaggctgctggagactctgacggtgggtggctaacactcccccaaaccatccccgcatcacggctgtccccgacccccagtgccaggggctctccacccttcggtgtcctcctcactcaagaccgctcagccatggcttgaaggcacagcccaccacgctgctcccattttgggctcacattttcctaattaatgctggaggatgggctgtgcccttcctcctccccctgggggcaccctcccaggccattctgcccagaagggacccatcgtatggtcccctgtgtttcacaaaggcttctaaatgagctctggcagcctgaaccgggccccacgggggacccagagcctcttcaaaacagagccctgacaattaggcagtctgagttttgaaaggcttgggattgatggtgtggacagtaaaaacatcacctggggagctgggtgtagtcctccgagggttgcctgaggtcagttgccatggcaacggagaatgagctcaaccttgtaactgacccttatctttttttgatctgtgggccacttggggccagggcttgaaatcaactggaaaataatccggtcacatatcagaaagaaaactatttatacttatttacccaggtacccaccaacgtcccccttccacaatgctgtcgacaccgcaataaaccgacatcgcatgtgcaaacgaacgctaccccatggcaggagaaagggggagaccgaatgccccatctgggtagaatgccaattccacgcatgggcacgtgggtgtgggtgggaagggtcaccccccaccctgcagcctcgcccttcatcgctactgaccacagcaagactggactctcctgccttccagcatctggtccaggcccaccaagggacggcctctgcgatctgccctctcgcttgctatgcaggcatgtggtttcagcctggcttgatcactaggttgtcttccttgattccagcatctgacaagtctcccctctgccagaggctggacagagaggccaggtggaagttcatcactttctacacctgggggtcgcaatgggattcggggaacgaaggctaagaaaggaggaggacagaggccttccttcctggtcccacacccgaggaagggctggctgcctcaaccaccccagcattcaccccagggtttccatggcaagatcggccatctggccaaagcctgtctccaggacacagctctcctaagttataagtactttgctcgctctctccttctctgaaactcaaatcagaagactccagatggttccactgaccaactgctcccaagagccatgtcagatggatcttagctaggggtcagttaagcttgagaatgatttctggtaaactccctgtgagatttcccatcacagcaaacaggacagctcagcggacggcccccgactagcccttgtttcatcaagactagatccttcagggagtggggaaaaacatggccaagaaccaggctgcgcggaggagaatcctggctctgctgcagatgcccagggtgacactgggccaagcgcttccctctgtgtctcagtctctgactgtgaaatggggagaaggttgtccacctcacagggctgttatgagagtaaatgagagccaagtaaagaatatgaagcatgacccccggcacagtggcttacacctgtaattccaggactttgggaggccgaagcaggaagattgcttgaccccaggagcttgagaccagcctggacaacacagtgagaccccatctctacaaaaaaggaaaaaattagccaggcatggtggtgggtggtacactgaggcaggaagatgtcttcagcccaggactttgaggttacattgagctatgaaccattgcaccccagccagcctgggtgatggagggagactctgtctcttaacaagagcacaaaaaatttttaaaattaaaaaaaaattaaagaatactgatcataatgctaccaccacaactattactgctattgttacttctccttctttttttttgtttttttttttttgtttgcttttgagaccgagtttcactcttgttgcccagctggagtgccatggcacgttctcagctcactgcaacctccatctcctgggctcaagcgattcccctgccttagccgcccaagtaggtgggactacaggcgcacaccaccacacacagctaattttgtatttttagtagagatggggtttcaccatgttggtcaggctggtctcgaactcctgacctcaggtgatctgcctgccttggcctcccaaagtgctgggattacaggagtgagctaccacgcccagcctgccattgtcacttctgacatgactctacctgaaactccatgctcaggcctggtgacatggcacatacaaacccgctgtgggggccatcaaggcaatagaaccctgctcctctttcagggcatatggccagccatgtccatgcccctaccccagtaaatgtttaaagacccttagcacctgggacattgtgtgttctctcatggcacgtcctatgctacttccaccttcaaaatgcttctgtgtcagctttcttcatctccctcctcctctacctccacaccactcccatatttgcgatggcgaaactcgtgtccagattttaagcccttttgttcccttgtggctcgctgcagcttcctacttcgggccatatgagttgactttgcctcccctctgatgctcttggacccaagtttcccatttctttatggttcttcttgcttctctctcttgaaattccctgagattttcatgaaggtcagagcagggcctgactgagtcaggggcgtgatcagctgcatgcaccccccaaccccttggcccttggccagcccttccccatagctgggcccatgcagaaatctccctaacctgaaaggcctcagagcccaaaaaccgcagagatcggggcccagcctggatgggattaccagtggaggctccttccagctctgagagctgattccacactgccagggagctagcactgaggtgcaagcagccctgggtggttaaggagaacatcaccatcacagagggtcctgcttgctaacttcctatgacgctggcggacacatccacctcccgcctctctgagtgatcagcaattgctcagagacacatcattagcagacacatccaaatcccggctctttgagcgatcagcaatcatgacgggtggtctttggcaaaagaaaagacaaagatcaggtcccggacataacaccaagagacaggaggtaactatctcagcttcttaatagaaagagaatggatgtctgagtgatgaaataaaccacacacaagagaacaagcgggacttcactgagaaccgaggaaagagaactcttggagttctatacaactcagaacttctctgcctgcacattttcagaaggcattccacagccctcctcacacacatccccttttacctgtaaagaactgaaggctgatcacctcagaaaatgaagattccactacatcctggggatccactaggtaaaagcaagtagcttattctttcttaactcatcaaacacctactgatgtatatcactgatcttcagattaaagttttcaacaagacgattgcctaaacatccatcatgttaataatcctcagattaatggcctctaataatacacaattaacatgacaggcaggttgcaaaacccttattgtcaccgaccctgccagggacacatgaattacccctgcttctactacaagggttttctctactgccgacatcattttttgtccccaccaagatcattttttaaaatgagcaacagcaatgtgtcaaaaagcctgacagttaccaacgggcacacacaaacacaacacacacctgcagaatgcaagaaagcaacatttttcaaaagttccccatccaggtaaatacagacagaacttttcctgcagttactagtactcaaagcaaaaaacccccagagttcagcttggaaactggaattcaccactttctcaaagtccaccttgacctgggtcactggacaccaccctccagctgaaaaaaataaacaatgagactagaaaataatgactgacttctattgaaaagctttaaaaagtagatccacactgtcaatctagtagttactggccacctgtggctctttagtttctgggtggtttttttttttttttttggttttttttctgggacagggtctcactgtttgcccagcctggagtgccatagtatgatcacagcttagtgcagcttcaaacttctgggctcaagagatcttgctgcctcagactcctgagcagctgggactgccagagtgcaccaccagacctggctagatttttagtagagatgggatcttgctatctttcccaggctggtctcacactcctggcctcaaatcccaaagtgctgggattacaggtatgagccactgtgcccagcctgtggctatttaaatttaaattaaagttgaatatatttaaacattcagttcctcagttgcaatagctaatgtggccagtgactaccactctgggtagtacagaatatttccatcattttagaaacttcatttggaaagcattgtgttagaatacaggcaaggtgagggcaggggctctccctgtcttattcaacactgtaatcccagaacctacaacagcgttgggcacataacaagtgattaacaaatatttattgaactgtggaatgtgagtgtcaaatattatgaagaacacctcagcccttttgctgttagcacttgcttgcaattgcaattgccctgcctgagaaaccacttagatgtgaacttctccaacgttcaacataaacctacaccctgataattatgtgggcactttgcccaaagtgggtaagaatatgacgaacacaggaacactgcagagccatgaagtttctctgaaggatgtaacccaaataccataactttgaaccaacaagtcatatggtggatcaatagcacctgggctcctaaccagtcaagaagcccaccggccacagcactactgagttgccttttaagccggctgagccctgtggctcatcgaggaaataaatgcttggatttctgatgctgagctaagtggtctgtgtgatttctcagctctgcttctgcaggctatgtctcagagagccgggtttttgctgtgacccaagtaaaatgaaaattgaagctaaattggaaattcaaacgcaacatggaataaatgaatacattcaaatcaatgatactccttccaagtagtcacatgattgcgacgctaataccagtattgggtctactctggggaagcgggtctttcttcagttcggctgaaaagtcacccaagatagcgaggcttatggtcacagtgcacagggccctcaaaaggtcttttctgaggtcacgtcttcctctcaagtctactcacctctccccttccttcactcgctcccctaacaaaataccaccttcttgaggccaagcccagtgctcggcctttctctcttcaacagacccaggactgagatcaaatgaggccgatgggatgccccaagctcacattagcttgttgatgtgttcagctcccagagctgagccctcccataccattttctcagatggtgtgggcccagcacacagggaccagatggggggtctgccacctctgggcggcttagaccccattgccagctcccagagcccagccagccctcctgtctgcccttggctgtgcctcccacctgccaagcaggtgcctgcagcctaaggtctgggctgatcccatccagcagccactcctgacccacagaggcagagcttactgacagctcctgacagcccccaccaggagaggcagggacaggcagagggggactgggcaggtaaagaatgggctcattgctgagcagcaggggagtgggggtggaggccacctccacacagcctccaactctccagcgaggtgcagcgagcagaacagctgccattagctgtgatgagatgtgagcagtgccaggcccacacaccatagcaggaaaacgccccaccgtacagctctggctggcatcttgcctttttcctacttggaaaagacatcttcatagacaccttcatcaaaaagcacatgcgacagacacctggcaattcaccctttgctctccgctcctggccccacctcatcatgactgctccagcctcaccccctgccacattcagacacactgcctggataatcctccccaggctccacagccatcatttccctctcctgctcaagaacctgcagtggctccctttttcccagtgcaaagctgcactcttctgccaggtggccctggccctgcctacctaacacccctacttttggccgcacccagcttcctcctggcccaagggctgcactcacagggcctcactcattcctgagggttagggctagggttaggttacggattctgtacccttattcaagtagctctcgatgccttgcctctgtcctccaggccacaattttccaaaaaggagttttcgttgcacccaagttattcatagctatgtgaaataaaaaggtagctttcaaaacattccttctctttgcttaagctaacttgattttctgtcaacttccaaccaaaacaatcctggctaatacattatctgaggatgaaaaagcaattctttcacttttctggtatttcttacagagccagacaaacacgaggtgctcaataaatgctaatagtttgctgtgcacatgtgtgtccatctcttgatcatgtcccgtgggaagagaggtgtcatccctatagaccatgcccttcagtggcagcaggcacaggtccctcacactgtcccctgatggatagagtcctgcctcaactacaccccccacggctctggacaccagccctggagcattcaggtccaggtctcaacaccatcccaaatgcaggaacccagacatgtggctctgggtccacagatgccactcttcatgtccgggagcaaggcttgctctgtgggggtgacgcggtggggctgcatcttcccgggaaccccataccacctcagccaccatgccattctcagggctggacataccccctcatttgctcatcggctgcattcagctatagctttctggtggcacagcacatgaacagaagtgcagcctcggagtcagattgcacaggttcaaatctcccaccaccatccactagcagtgggatcctggaaccccacctccccgggccaatgttccccaccatgtaaaatgagaatgattgtagtgcctacatcataactgttgggagatgaacaggcttaatagcttgagttattaatatcactgtcatggttattattgaccctgaggcaggcactgtgcaaggtggtgggtgtggggggtgtgagtgtaacagagaccagtgagacactgtcacacccagcttgcttaggaggagtctgggaggcctggccaagggacatactttgtgtgaaaacacagtcgcccagaaatcctaaaaaaaaaacaaaaccaagtcctttgggaccccagagtggggaagcagagctccaggggaaatgccatggacgtctgggctggcaggagttggaggcccagcagctcagccccgcctgtgccagagctgtctgtcctgcctctgtcatgccacagaacagcctcagtgacccagggcccaggatgcaggagccgctctaagagggcaggcagaagggcagagaggaccagtgagaggggccaatgttctggtgccactgaagggcttggtctagaggggtgatacctcccttcctactggacatgaccaagaggcagacacacacatgcacagcctctagaatgctggcctcagctggggaatctagctcatagttcactgctccagaacccatttcaaggtcctgcatactaaggaatttccagtaagtacctccagtcacagcaaagactgtggccctgaatcccatccacaatgtttttgttttgttttgttttgtttcgttctgtttttaagacaggctagagtgcagtggagcaatcacagatcactgcagtctccatctctcaggctcaggcgatcctcacacctcagagccctgagcagctgggaccacaggcacaggccaccatgccccactcatttttttttttctttttttggtagagatggggcctcactatgttacccaggctggcctcaaacttctggcctcaagcaatcctttcacctcggcctccccatgtgcttggattccaggcatgagccaatgcgcctggcccacaatgttaaactcagattttgggggaaaaagcaaatccaaagccgattactctgctttcacctcatgctttaatcacaccctgaatgcacaagggcaggaccttagtgacaatttagaattccaaaagccagggtttagtgaagcctgttgaatcccacttccaaaacagactgtgtctccaatccatgcctccacaccctcaggtggggacctgcacccagccctatcctggcctccatgtggatggctcccttctcctcatccagagctgagaaaagtaggaatccaagacaccatggagagggctgtgcatgtgctggtggaaacaagctccagcatgaaaatgggggtcccagtggccctctgtctagttgacaacagaaaacacctccccaacttcccatggctgagcccctcctgccaagagcaggatgtcctcagaacccggctgaagaactcagctccacaggcacactccctgctcacctgcccctcatgtctgccccatcagggactcccgctctctgcacccagaacctatgcttccctcccctagaacaggtagggaggaaggatggaccaccatctctctcacactgcttaggcatttcccagcacctaacaacctggcacacagtggcactcagccaatgattgctcaatggcagggggctttctagagacaaacaacatttagtctctgtccacagccctgtggaccagagacaaacgtcttctctaaaaaggcagactaacaatcactcagactaacaatctcccacttcacccacaattaagtggaaatacacaaaaccaggtagtaaacacaatgctattttggttaagaaagaaaagtgagggaaagaagggaatgactatatttgtgtgtgcttgtgtgcgctgagaaacttgctggaaggacacacattaaggtgttagagggtcatctctggaaggcaggatatgtttttcttatttttgcttggctggattttctggttttcctgcaatgaacatgtatagcctttgtaatttatatggtttggctctgtgtccccacctaaatctcaccttgaattttaataacacccacctgtcaagggcgggaccaggtggagataattgaatcatgggggcagttccccccatgctgttctcatgacagtgatttctcacgagatctgatggttttataaggggcttccccctatgcttggctctcattcttctctttcctgctgccatgtgaagaaggacatgtttgcttccccttctatcatgactgtaagtttcctgaggcctccccagccctgcggaactgcaagtcaattaaacctctttccttataaagtatccagtgtcaggcagttctctacagcagcatgagagcgaagtaatacactacaataaaagctttttaaaaattttaatccactgactagtgatggagacaatgttggtaatgactaggcctaggtctctctatctataactggaaatggttggaccagagagctccacagcccctctcagcccctgccttgcagatcttcagaccagagattcccagtggcagtgactcttcactcaacagctcttgctgggctgaggcctcagcagatctgctttctggtccctgctgggtctctgccttcatgggggcaaattgctccctctggccttgactctattccatcacctgtcaagtggaatggacaggccaattttcaagcccgggctctgccactgagtgtcccggtggcctcatcagtaaaatggggatataattgtgcttgatgcataggattgagtgatcctatgcatttgtagagcttggagtgaatgcacctgctgggctggtccctatggatggccctgaaaagatgtgagtcatcatccactctcgtacctcacacagtgttctgtcccatgtgagctggaatgtgcctgctgtgacacatggccagaaggccagaggccaggaggtgtgaggagctgggaggcgagtcagggacagatgccagggaggcctgggaccccccatgaggaggctgccacgtgatggctcccatagccagttcagacactctcaacaaccactttgtctggctgggtgcaggctgggccccagcccaccctggggaggaggcagctccacaggctcacccggccagatgccgcctgcccagatctgcgtcctccatgagattgaagatgacaggctctgggggtggggaggagccaggtcagcggaaacttggcaacgagaaaggcaagaggagcagctgagctcagagcaccccgtggcccccacccttccaagggtgcagcgagaggttctgtctgcaacccctcaagtcccctagtggagtggaaatgttcttcatctgaggctggggtctgttaccccttcccagcctaccagcttccaaagagacagcagaaagtgatccaaagatccaatatttgtattttgaatgctaatttgacatagaggagtgggcatggggagtgtttataatcagcactccaataagcccacaaatgacgccagtattttataagcttgttagaaacaaatcaccccctcagctgatatttacttactgatgaatcataaaagggctcaacacacaaagaaaatccaaaaagaatgtctttcttcatcccatgttcggcaacaatgctgggagcctggcctgggtaagcccaagcagcgggccttctccagcaccagtcctcagccccccaatccccacagcctccccaggggtggcaaatcatcggtgccagccccatctccgtgcccactccccaccacagcccccacccatcgactggcctaatctgaggctcaattcagcgctccagaggcagctccgtccttctgctgcccccggagtcctctgcgggagcggatccaatccagctaatttgcataatgatgaagccctccagtgcgggctgggtcttaagagggttgggaagaaatatgccctgtcctttggagaggcacacagaaggctcagtgcagcccgggaggaatggggcgcctggcgggtgggcgggggcagcgtggaacccatcagcttccccgccaaggacagctcagccctgtcgcccgctgagcctatgtccagctggcccaactgaggaaggactgcccagggctgtaaaccagtgggaactcaggcacagagcgccagctccagacgcaagccggagtcatatgaccccggtcacagcgaccgccactcacgggctggctgaccttgggcaagtcgctgacctctctgaatctcagtctgctgatctgtaaaaacagagggagatctaccctacagggctctgtgaggaccagcagaggtgcctataaagcactgagtagagtgggctgatagaatgcaacaactgtcagctgttaaattaacaccgtcattagtctaatccctgtggtactgggtccatccatgcacacatccacctgtccatctacccatccatccatccacctatctgtttattcaacaaatgccaggtattgtgctaagcagtctggagaagagagaatgaattagacacacctgcctttaaatcacctctagcaacaaaacgacagtatggtccagaggtgaggccagtgcttgcctttgagggaggcaatagcaggaaggagtgcagggagctaccagaggccactgggttcgacttctcgatctggatgtgttctatttctgcaaactcatcaagctgtgcacttaagaggtgtgcatctctctgaacgtacgctatacttcaacaaagttttaaaaaaccctcacgtctaattagggagggagatcagctgggtatgcacataagcattacaccaggcaggaaggggtcagctccttaagaagggtgaataaaatatttgggatgggggtcgaggtaacaccaagggggaagaaacttcctccgtgacaggtgaggatcaccttagcacatgtctggtgcataggtacctactgaatggatgagtgaatgaataacttcctgaatgaggtggccttggatgaacaggctgagatgtggaggcagagagggcgttccaggggagggtgcttgcaggggctgaaggcttgggagggttttcctcactgagccaggtgctggcatgcagcagtgacctgggagccagggcttttgcccttgctgggctcacagtctacaggcatcagacatcaagacgtaactccaggggatcgcatccttcttctattctgcagaaactgagcgcccaagcgcagggtgcagcattgggtgctggtgatgtgcagcagaacaggacaacaggacctctgacctcacagtgtgaccagaggatcagagctgaagcgaagccagctttacacagtcacttgctcatcacagtggcactatggggccggtgccgttattattcccactccacacatggagaaagtgacactgggtgaggtaaagtgattgtcccacgtggctgatccaggaccgaaatgcaactcttaacctctgccaacaatggcccttccccttggcctctacggaacactttatccccaggtctgtttctcagccatgtgagtaagctggatggaggtggcatttttcgtcccattctgcaagttggaacactaagcttctaagtatcaagttgaaaagatagtaagtgacagaggaagtgaatctcagggccctgactccttgtccagtgctccttcccctgcccattgctgttggacaggataatggggactgtcatgaagaggaggcgccgggcaggcttgacaagggcagccccatcacatctcaacatgtgcaagactgggccttggctgccacatgaccatgccaccccatcaaccctgctcagagcctgtgagctacacaggtgtcatgcccagccctgccagccagggtgaccccccactctaactgttcagcaccgagcctccgacagaaaagcaaccccagactgcagtggtagctcatgctgaaacaattctcccaagctgctttaaatggagattttgcagtttggggtacaaaattattgtccacgtcacatggggagtgggcagaatgtatttgcctgtgctgagccacagttctgtctcccaagcaaagctgaacagacactagccaagactgggctcgctgagttaataaagattagctctcctggactatcttggaggcattcaagtgctaactacctgccaggcattcagctaaacactttacatctgggatgggctcataaaatctctacgaggaggtcatgatcttgtcctcactttacagtaagtgacagcgcccaggcctttcaaccacagagctgtgctcttaaccccagggctgtgctaacttccttaccattattcataatcgccattggtagcataaggatagaggcaattaaattcaacacttaatttctgttatgtgcaaagcatagagccaggtgttgggaacataagcagaatgagaactgacctctgtctgcaagaagtttcagatttttatacccacaaatgcaagacatcttttcactaaggttttttttaatgatcaagcacattgcccagcatcttgcacaataaatgtcttctgactacacaaacaaacaaaagttaacattttttaaggagaacacattttccttccctactggctgttctcaattccatttcaacacccctccatccacttaaactgtgactttcttcacttccaaacagtacaaacgctttcattaagaaactactcggtggggtgtccttgggtaagttggtgccttttctgagctcagagacctcatttgtgaaaggaggaggtaggatttgataactcacaaggtcactcggggatagagtactaggatgttaatggccagtccccatcctaactgtagaggactttatcagatagttggcggctataaagggatgagcatgtgagacttccattacaaagttcaagatttaaactcgagggcaagacatcagaaggaggcactcatagtgagcgcgcacagcagctgaagctatccgtggaagctcgagatgtcatcagggggcacagaattaaacgccaaggctgaaccttaatgcttttcgaatattccctgcacttcttatcagtccctattgtcctgtgctcctcagccccaccctgatctgcttgacctcaaaggtcattgagtttgtgacccctgtgaaagagaattcattcttcaaaggcaaagcaagagagaagaaagagcataacatttgttaactgggggacgtcaatgcctggtgcctggaagctgtgtgatcttaggatagtcacctaactcctctgagcctcagttttctcactgtccagaatggacaaaagttttatctacttgatactctttccagaaaaaaaaaaaaaaacaatcagccagctttcccacacttccaataccctgcagaaagttgtaaactttagagaaatcaacaaagacctgtgtattaagatagggaaagctatgttgtagtaacaactcccaaaatctcaaggggtgcaatggtttatttctcatttgcccttcacatccattgcaggggtttctgcttgtgaaaaacactcagatgctgagagtgccccagggaaagagagaatgctgaaaggtcccactctgttggttaaaggctccactcacggctctctggccagaattagccacaaggcttcacccaacacaaaggggccacgatgcgtgatcctcccacataccaaaagacgacactaaggataccacgttaacaagaagagccataaggctcagcagagcactctaagaatctcaagggaggagtcagggacataagaaaaaagatgaaacctgaaaactcaggatggtaacaaaggttctcagaggatgtttgcattcatcaaggcccaggaatggtgggggtgagcagctggcagcatgctctccaactccctgggtcagctccacagtggtgagtgggccctggcggggaacctccaacccccacgccctcttctgaaggcggagggtggcacgctccttccagcactccaccacagccacccagctctccaaagagcacagcaggtaaatgctgggcgttgtcctggggcttctcgcaaaagtcgctcttgacgataatggctttaggaggctatgcaaccacacgcctggcatctgaaacatcatctgaggccaggtgttgcatctctaattaggatggggatttttttcaccccacacagaatttacataattgggaaggaggttacaacgaggaccatccccaccaattgtgcgttttccacggcctccttccactttcccttgcacacctcaaatttaaggcagaaatgaatcgatttgaattttttgaaattaattatcatcattgccatggaaaatgtatctgccactttccctggggagttgagagaggaggggtgatctcatgtggaggagtgctgggagtgccacacatcacccactgtcctcttaaggaaaaacctccacctcacccgacctcacccagtgggtcctccaagcacctcccagtttggtctgagcattcttcagaattttttttagcaccaaaattaatgctttaaaatgtcacttgctacagtaaaatttatcaacattattatataccatagaaactgccatcccagacaaatgcacgacattaaaatttggtctagagctccccagaggaaacgtttgctgcaatttgtataacagtttatatatttatgctatttaatggtacaaagcaataattatgacttcattcactgataagcaacggcattacataaatctgatgcggatttagaacatgccagctctgacaccagtgtactagttgtaaattatgttgccgttaaaaaaaaaaatccaagcaaatatgaaggagcagcaggaaactaataatgcatctccagctgttccagttaacctgcaaatgtggccatctgcacctcgggagaaagagaaggggagagagacggggaaggcggagcagagagaagggagagaaggagacagccgccttcggggaagcacaaagccttcccctgacatcgaaccaatgaccttgctcctcgctgccaggcaagccgtgcctgaaccaggaaaagtttcccaagagcgctgggtccattctccactcctctggcatccacacccggacccacactcctgcccctggccagaaaggtggccccagtgtcatccctcctttccctgcctctctagagactcatcttgaaccttccagttcctagttactgcaacactggtctgaccaggcagcttcctctacaacttcatttctttctttctccttttcattttaacacaggcctatcttgcattttttttcttaagtgggatgagtggtgaaaaaaagtagttattgtcagatgtgtgcccacttcagatggttcaaaatggagctacagggttcaaagactcgaactattgaatgaaatggaaatgctcagatggtggcagatcacagatctgcatgtgaggacttccactgggctttggattcctggggccgtggggctcttggctttgcctggtgaatggggggcaggagagatggtctcggggccaccaaagactgagggtgggaacaggcaggagctgcaggctgggggtctgggctgcaactcaggccatgccccaccctgcctgcaccccccagagcagacaaaggtcccatccggcctccagccagatggcagggaagagctctcaccaggcaagtgcatgattctgcttaggggcatgggctcccctgtgaacctccccacatcagctgcagctccctgggactgtccctgggcccaaagaacggaggcacagcagacccatttcctctcctctcctccagaggttggctgaccgagaaggtgacaggtctgggaccacacctccttccctaggtagaagggtgcatctacagcttcagcaacagcagctaacatggagcatggattgtgtgctaatgtgctgaatactttacataaattcacacatccggtccttgtaacgtccttttgtgctgggaactactgttattcccatcttacagataaggaaactgagtcacagagagattatgtaacttgctcaagatcaacccagccagtgaactaactacatttctgaaccgtaaggcttagaagaatgtttatataagctactctgtacttttcaaatatgttttgttttttccttctttttttttttagacacaggtctcattctgcttcccaggcaggagtgcagtggtgcaatcaccgctcgctgcagcctcgacctcacagactcaagcgatcctcccacctcagcctcccaagtagctgggaccacaggcacacgccaccatgcacagacaatctttttcaatatggacagagtcttgctatgttgtccaagctggtctcgaactcctggccttaagcaatcctcctaccgtggccttccaaagtgctgggattatagggatgagccactgagcccagcctcaaattgtttaaactgcaacccacagaaagaagcatatacatgatgacctagctgcacattaatacacatggaaaccaaagcaagtttcatggaaccacgtgagagcttactcaggaggatggattctgacattacccttcccttttcccttttcgtccattctcttccattctgtgttctgctccgccctactgtttcctctttcatttcgttggctgtggctgcctaagttgatttcatgatttgctaatgggttgcagcctgcaatgtggaaaacactgcctatttcaattccctcattttacagaaggaaaactgaggctcggaaagagaagactgcttggccaaggccacacaagtctgtggcccagccagaaccaaagcccaggcctccagctctctttctacaaaacctgcagtcaacgccaaccctaagcctttcctgggcctactcagtgcccctttctaaccacactggggataactgggtccttggccatagcgtggggacatcatttgtggataagggacagccgtgggagcaagggacagacaagggaatgtaggtctccccaaaggggctctcaactcatgccagtaatgattttggggatgtggccggcccaacaagtctagctctgagggctgcttgccaactgcccccagcctgctgggcagagcccatgtggtcacacacagagaaggcgaggcactgcctgcctgggagtgacctccatcagggtgggcctcccttcgcaggtacctagagggcccctttgtggctgggtttgcaggaagctgctggaccgatgaagagacagaggaggaaacaggtgattctcacagggccacaggcagaatcagcaccatctctccccactctcccttatcatcaggtcccaaacagaagagctatctctatgccccttccaggtgggccccccacggaaggccctcaagctgggacactgggagggatgtgtgttcccaccaccctccttcccactcaaacttcctatcgtgttgacaaaatgtttttgcaactaagaaaacagcatttcttggctattttaattttcacagattcaacctcagttccaacatccaacgctccgcttttctgccaaaaagtttcaaaagcctccattggagatttttgcaaggtgcaaggaattggttcctatcagcatctcaaaacacaattccatcccccctcccaaaatacacacacatcagcttcttcaagagacacattctaagtacccaggatacggtctttttatttttatggtctaagcagaatcaattccaaggactagaaaaacaatccctcagtgagaacctattcagtgacactcccaggaggtcccgaggccaaactagtagctctgtctccttggcagcatgggggcaaaggacaaaccaggcgggaggtgggtcagacctgcacctgctgcaaaacacgcagggtgcatggaagctgggatccagagaggaggattgcttagaaaaggcctcctttcctcccaggaagggtgaggagaccctcgggggcacagctgagccagagtgggtgggggctggaagacaaggagctggaagggacaccgaaaacgggcccctcaagtctgtggctgggacaagtggaacagccaggaaggcatctgacatggatggaagtcaaggtgtttggacacctggaccaagagagtggcctcccacttgtacactgtgcaagtcctgtaccatcttccaactcaaatctgtggttctgttttagggccacatgggtgtgtgtgcatgcactcatgcgctttgtcattagttgccaacatttaaaatacaagaaatttgtattaaaatatgggcttttggcttctcttgaaaactcagaacatctggactctcccagatgcaattgcctgggcagccatggaaggggtgtgggctctctgcagggtctgcataaccctcactgtcccacgtgcagctgttgcaccaacttatgttaatgcttggcccccatagacacagagttgatgacccttgaactaggagaccagggtaccagctccctctgccactgactcactgtgtgaccttgggcaagctcctgcccctttctgagcctcagtaaaaactgtgcaatgaggagggtagaaatcaactctcttatacttgatgcctccctgatgcaattttaggcccctacaaatagggggtgggccaggagcaattttcctggtgagaagacagggtggaggggggcaaggggccagcgcagcccctgcagctgtccccaaggatgtgctgacgccactactccagcttgatatgaatattgtgtcagagattggagatattaagaatgacaatgcattattactgcagagggaaatctcgggagtcctagagataggatttctaaatcctcagccaaaaatcaatagtaatgcccaagaatttataaaagaagcacgtcagtctgcatttgagatgacacactttcggtttccagctaaaccaaagggacaagtgcaagcgtgtcattcaggaagggcaagaagcaaaaggcaaaaacctcacacagggtcctgcctgggtgatggaaggcagcttgtaggctcttgctcagaggccgggccatgatcccaaaaggcaagcagaggaaccagcggtgctccccaagggcccccacccctccaggaggggatggggatgcagaagagacccgaccccacctggacccgctctaccctggaaaccagcatttatggtgcaagcaagaacaaacaggaggcccagggcagagtcaccagcagggctattctgggctgtaaaatgggtacagaaaaatggccccagctttctcctgggatgctgtaaagatcaaatattaatttaaaaaaaatatcaaacaagctttctggggtgttaagattcaacagagcacagactctgaaggcagaaggagctgggctcaaatctgcatgaagtcactggaaaaatgataataataagtcttaccctacacagggatgttagaagggttagaggtactacctgtgcagtatctggcagaatactgagttctaataattacgacagtttcaatattatggtcatgattaaaaatgtaaacattataatttatatatatatatttcttttcttatattttatttttttgagacaggctcttggtcttgctctgccacataggctggagtgcaataatgcaatcatagctcaccgaagctttgaaatcctgggttcaagagctcttcctgcctcagcctcccaagtaactgggactacaggcatgcaccacccccacgggctatttttttacttttttgtaaaggtgaggtcttgctaggttgcccaggctggtctcaaatgcctaggctcaagcaatcctcttaccttagcctctctaagtgctgggattacaggcatgtgtcgccgagcctggcctatttttatttttttttagatatggggtctcactctgttgcccaggctggagtgcagtggcatgatcaattttatatgtatttcttaataacaaccactcttagtagattagatgataattttaagtctttttatgaaataacgtctttccctggcatagggctcccctgtttataagattctctcataacattttcattagggttgctcagaagatgaagtgaaagattctccattagatggggaactgaagccccccaaaagtgatatgactgaaccaaacaaatttgccaagttagcaacaggaagagcaatgcctccagcccaacacagtcccgccttggaggcagaggggactcccaactgcccctccagtgcccattcctttgctgggcttcatggtccccccacaacaatgatatcttttctctcctgacactggcactgggcagacttagaacaggatgcatccatgctggagagccccagagtcaagcttatccagctcccaactttacagaccccacacctgaggccacagctccaactccacattcaaaccaggagtttgaagcatgcctaaggacttcctcccttccccaatcctagatcctcaggtagtaacgccgggcatagcagcccagggagcaagtgcactaagaatgagcattctacctctacccatttgccatagctcggaggcaagacccacaccaccttcacagcccaccttggtgaccacaccttgacccaggcccccaaatcccaactacctcctaaacaatctggccgaacatcctctccctactttgtccagtctaaaccatttcaacagggtgctctaaatgccaagaatcgactgggcagtgggtggtgagcacccagggtgtctccaggaccagttgttctgaaaatgccaactcaatgttctccatttgttttcagggactcattacattaataggcccctatggtatcactttggctattataaatggtggttcttctgcttgactgtgagctctctgatctccctgaattattttcagttggcttttctgatatggaatcattatatgattattgtaggaaatttgcaaaatacaaaaacagataaagatcgcccttaattctacccctgttagaaacccactgtcaagattttggtctgtttccctctgaagatataaatcttacacgagaccttcaggacaaaagcacctggcacagtgcctggtacacagctggtgctcgacacatgtagcttgaagaaatctgtaagaacaatcaaagaatgagtgaatttggatgtaaagtgctttaaaacagcactttaaaattaagagcttggtcaagatggaaactgggatgtagacaactcaccaaggagtatcattttcttctgtatttcatgggttcatttcataattaaatgttaaaaaaaaattaagagacctcatggacacatattaaacacacctacatcaaaaactaggatttttccccctaaaacaaaaataaaaacaaaatacactggtcattccttaatgatccttaatgcctatgtcagtaggtccctcccactccaaaatcctagcccttgccacaaggaagaagctgggaaggaacctctccagtctatacctggagcaccagtaattcagttcaggctgtgcagggtggcatccagcctacaggcatcactcaataaacagaggcaacatttactgagcccttaccatgccaggcactgtgctaagcactttgtgtgtagtatcttatttaattttgacaatgagcttctgttgtcctctgctattttttcccattttgtagacgaaagggttaacacacgggttaagtagctttcctaggacataatgctagtaagtgttgaaggtaggacattaattcaagaaatctgactgcagaatccttgcttttgatccatacactataatgtctcatggattatgaacagatagatggatagatggtggatgggtagatggacatctggcaggtgaatgtaaccatggacaggtggatggtagatggtagatggaagaatgaatgagtgggcggatggaaggataagtgtatgggtgaataaataaatggatggagggatggtgcatggatggatggacagatgaaatgaagaggttggtgagatggagagatggatgtgtggatggatggattgatgggatgaggaggttgaaaggatggatagatggatgggtggatgtcaggtggataatagtcatgtgtcagtccagatctgcctcctttccttaacccaatgcctcagcactggagcacacacaagaagatgatccacaaggctgctcccatcaaaactacaataacatgagaaccacagacctgcttccctcccattgtacctaggaattatttccactcaacccatcaaagggctgagttttcaagcccacaagatcactggtctcttccgaccttcggagctttccaactgtggacagtagagaatttaaagggcatcaggtaaaggcaagccacatacagaaagaggcagtccatgcagcttgcccaaaatacctgctctcatgctgaagactgactttggttttgttcacttccaaacattccctgtggctctcatcactcttcaagtcagagcagaagtgccccctcttctccaaagccctccctctcaccctaggcagaatcagatgccccttctcagagctcccatacagatttttctatcccagcgtctctcacattgatttgctagctgtcctctcccatgggactattcacgtgagagcggagatttctgccctatcaactcggaggcccccacagcccccagttcagtactttgcacagagaggaactcaataaatatgtgtggaattgattccaacatcccaaactgagacctccacagactctgcagcctccccctacccctcttggccacaagtaaacaagagttcagccactgggctgcggaatttagccacctgcagttacttctttatccacaagagagcacagtgtcttgaagctcagcacaaattcttttgtaaatgcctcgtgtacttatagaacactgtataactcaaaaattataattaaaatgtcttagctcctgtatttatagtaacatttaaactactgtgctttcttgaagtcagtcatttacttgagaacagcacactttacggtgaacagatctttgaaacagtaccacggggatctagcccaggcacatgtaactcaatatatgtcaacagctgtaaaaatattggtgggagaaggcaggaaaaaaactatgagcccagatcaagtgccctgtctctcatatctgactgttttcagctgctccctcctcttccaaataattgggccattttggtgcccgctgtcacacaaggcgggccctctttgaggctggatgatcaaaaaggttataaatgaaaatgatttcgatgttggcggcctagagagtgaccagggcgtgcagggcggcagaggggctgttctaatcttaccaactgcacgccgccatcggagagtattcctagggcgcgagcagctccccagggtgaggccacggtaaattctgcctaatcccttctgcatacaaatgagcgcctggcaggaggagggaggggggcagacgccgcagcccctgcccgctcctcctccccgggttggctgtcttggctgaacaaacaagccagcgacagtggagagggctgcagcctgggtggaatgagaaggaggaactcccggggccaccagggctaggggaattacatgaggggatcctaggagcaggtggccctggggcagtgttctgaccctctgaccccagggggtggtggtggggacacgggtgcttgggtggaaaacgatggcatggctgcaggcccctgatattggcccaggtgagagaatgaaatggcagcagaagcagcctctgggctggggctggaggagctgccaggtgatggggcggtttgggtgggaatctgtccttctgaaggcacagcactgagttcacaaagatgcagaaactcatctcccatgaaggcctcaaggatggtagaaggcctcctcccacccacaggatgagcacgcaggaggcccaggaaaggccaggaggaagagcctccatcctgagcccccttggttccagccctgcaaggaagtgatcaattcaattctggcagccagatctagagaaggagtctgggcctgggcacctggggcccccaaagccagagagggctggctccagaggggctgagcctcaaacagggaaacagcccacagaggggaaaagacgagggtcccaccacagagagagccaacagacagccggactggagctacacagtgtcatcctgcagtgctggaggtttctgaagccagttttgcttgcagaaaaacagaggcaaggactgtttttgagatcaattctgaacctggtggttaactctccagggcaggcgttcataacttggacctgtggatggagcttgtggggccccagaccccagcaatggtgggcagatttcacaggtgcactgcatttgattgtcacaatctctgcacagggctaaggagtgacttaaatgagttaaataaaggatgcacagcacttaaactctgcttggcacacaagcaccccaggagcattagctagtattaagatgtttacttgttgggggcaaggagagaaagttccatggcatgaaaaaggtgagttgccctggcaaagatcctggccccagccctgggtcacttcccaacttgaaagtgatgcaggataagaggagtaggcccagaagtggctgtaggggccctccccagtgtgcaggagaaatcatgtcctttgctaagtaatggacccatcaagaggcccaggtacctgcacagatatgcaaatccacacagctcaaaagctagcatcagcccaattctgctaagggatccacacacacccacacacacgcacacacttgtacatgcacacacatcccacgtccacatcttccatgaaatcagcaggaattgcacattttgaggacccaattaagctcagtgtgtatttgacaacctttcaacctccagaagacatttatttttacaacactctccagctgagaaattactaggtttctgccctttcctgaatagtcttggcattgggaagcaccaaggtgtacctggaagcgagcggggttttgggggggtcccacctggaggggcccagcaatgacatcagaaccactcagtaagggggtctcagaggcagggatgtccgaggtgggggcaagtcctgagctccttaggggccacaggggcttccctcaaccttggacatccctggcccaggcttgccccaggcatggcctgagtcagctgccccttccaccttctcaccatcccctggactcctaaacaccactctgaaaggcagttgtatgtctggggtggggagtactctccatctcatggacagagaaagcgagtcccagagaggtctactgacttatctgtggcttggccacacaaaaggggcaaagccctgggatattgccacttcccgctttgtactttcctactcagtaccaaagggggtcagggaacagggtacagtacgggaaataaaaagaaaaacagaaaagcaaagccttctctgctaatgaggtatggtgggctggagcatcagcatggggccagatggcgagagatttcccctaatctttctaggaggccccagggaacatcctcaccagtctccatccatccctgatgaaattcctccaactctctcctgctgcagaatgagtggttggacccaaacctatctcaacatcactgacttatctctgccccaagaggatgaatcttcccccactgaaaagaccaggacttaatatccttgtcaaggaagaagagttgatgacaacatgttttcctgtgggcggtctgctcctgattcctggctctttggaccttcgccaagctccatcttttgtgcatttgaaccaaggtctactgtctacatcagtatcatcaggacattgctggccaatgtacccagatgctagaatttcatgggtatttcatagcagggtcccatattcactaacattttcaaacaaagatgagtaaactgaaggcacgatcccagtcaagaaagcccacagatgtcctcccaagagaggtgcaaacggtaccactgcttgtagatttacccagcacacatctatgatttcaatgttagtctctctttggtctttggctgtctaaatgtcatggtgactttgccagggcaaaaggtgtgcccagaaaattgccaccctgtcacagtagcctgagagcagggtaccgagtagaacatatgctctgtatggctttgtttgcacctctgattctgctatctcacaagcagcaggttggcgattaacaaaatagcaatagcatcgaagccggtgacaactgccatcatcacggcagtgacgacagctgtcaccaggagccagtgagcctgctccttcccacccccagagtccccaaataggcaggagctctgagcattttagggaaacttggccaatcatttccgtgaatctttactgcctggacagattaaacccaggccccaagtggctctcccagttgacaatttttctttcaaaaaggccgaagttgctgtgagccaagttcttgcagccgaattcctggacacagtttccaacaattccaatcagccagctctgcggttgggctgggatttcaagcttgccacagtatgaagtccagtttgggctatattcccttccctctcgcagcatgatgaaggtttccccgcaaaatcaaaaggcttactgtcaagttttcgattggtctgggcttcgtgctatcgtgtgtggtgtgggaaggaatatgaatgtggtgccggctctaccatggggccttgaggcctcgtccaagccatccagggaccttatgaaagtggaacggaactcttttcatgtatattccaactgctgaaattccccagacacgccacagtgtgcaaactcggtgtaaaaagaacaatggctggataaaaaccgaggcgagtcggccgagtacgctgaagacaagccagtgttgctaatgcaagggaagccaagcctggattctccccctccttcttcacctcttcttttcttcttttcttttttcctttagcacgtggaacttaatgaaaataaagtcaccgtgtttccagggcaggaggctgctctttacttgaataaaatgtacatgcaaattcactaaaggaggctggcacttgggaaaacacagagatgatactcagggctcaaactgatggatagcatttatgtctcctttctttttttcttaaaccatagagataatatgtgtctgtctatatgcacgtacatgtgcacatataaaacagggctgtgctagagccagttcatactgactcctgagagccaactgtgcgtttctcttcccaactccagattcagcgaaatgatattggtagactgaaattggcccacagtgggagtatttacaccacagaaatcggcaaaggctacaaaatcaaaattctgttttttatcggacagtgagttattaaatatttaccaactatattgtaactacatctactttactgggggtatgtgtgtatatagatgtatagaggcatatatagatatatacacatatatattacatatatgcaccagatacacagaatacagatgacatgcacgtacttttaacctttgtatactccccttaatccataacctctctttattcttcgaaagcaatatgaaaaccatggatctaagtgaatctgtatgcttttatcataaaaaagcatgaaaaaccaatctgctcttccaaaatataaaagcaatcactaaattgattcctttttttgccaggcattaactttctcctattactgcaaatttgctgcacttgtattttcttccagccccagaattaaacacacttctaatttctcacttcaggtgcattaagtgcggtatagggcacaaatgaataattttattgataataaattttataatccatgcagcacttgctgaaaaatggatgtgttctggatgcattctttatttctcctaatttgaagacgccaggattgcggtcgccctgctcactgagcctttggtaattgctggctattttctactgctttgagggctgattgacaattcaggcacgtgctctgctttacggggataaattacaataaccagtttatcagattattatttttattaatttaagagactagacaacagtagtgagtggcttctgtctcctgcagacagaatttatcctactagtttaatggtgctgtgagaagctgtagacataatatctcacaaaaggtaacatccctatatagtctccccaaatcacgcaaataaaacatcaataggaagaaaccattatgggagagtggtctgactgcagttgagaagggagaagcagagaaaaacaccaaagaattagctggttctgagcttgcttggaaaggataatggttaggacatcagacaggtctcagtcccagccagctgaactggatccgtgtgagtcttaaacaaattaactctctgaccctttatcatcatctgtaaaatggaggcaaaataacatctgtctcttaggacacaggaggatggatgagatcatgtaggtaaagtgcttggcgcagtgcctggcctgatacacacccgatgggtggcagctgttaactgttcttgggagtctatactgaagaagccaggaaagtatttgtatcaggtgagaaccaacaaaaaagtacagtctggaaactagatccacaaaaagttgtctatgattgattgtaatgggtgagttccccatcatgggaggcattcaaggaaagctgggcatttgtggaagagattcatgaacggattctagaatcagaccagatgatttgaggttctaggattcttgtcaaactattcaagattatggaagaatttgtccaaatagccaacgttcattgggtacttaaatgcccagcatagctgtaagcatttttttttttgagatggagtcttgctctgtcgtcaggctggagtgcagtggcacaacctcggctcactgcaacctccacctcctgggttcaagcgattctcctgcctcagcctcccgagtagttgggactacaggcacgaaacgagccaccaagcccagctaatttttttgcatttttagtagagatggggtttcaccatgtggccaggatggtcttgatctcctgacctcatgatccacccaccttggcctcccaaagtgctggaattacaggcatgagccaccgcgcccacacagccagctgtacgcattttacatgtcactatagtttggatgtttgacctctctaaatctcatgttcaaatctaatccccagtgtggtcgtgttgggagctgggatccagtgggaggtgtttggatcacaggggaaggagcgtgagtgagttcttgttctgttagttcccatagagctgattgttaaaaacagcctggcacctcccccctccctcttgctccctctcttgtcacatgacctctgcacatgctagctctcttccctcttatcctatgagtggaagcagcctgaggccctccccagatgctggtgccatgcttcttctacagcctgtagaactgggagccaaataaacctctttataaatcacccagcctcgggtattccttcacagcaacacacaaggtctaagacaaacgatatctcacttaatcttcacaacaactctctgagagagatgctgtcattatcttgattttatagtcaaggaaagtggggcagcctgtccaaagtcatagagccaggaaggggcagagcccagactcaaaccaaggtggtctgcctcccagagccacgtctttggcctctaggcctgtcggcaccatcccaaccacacccttggaccaggccaatggcatccacctgcacctctccctcaccccctgagacccctccccatggcctgctactgaaacatacacatcccactggtatggccagctcaggaatccaagaaaacatctgtgacctgattgctcatcaggcaagaaaccacgagaattccatgtctgctcaagagcctccaatcatgccaccaatgggcagagcttatttcccaccatctgatgggccaaggtcatgcacagcagctttggaagccaggcctcttcccaacataagactgccacagttgatgtgtgataccagcaggctctttgcctaggtttgtgtttccttgatgaccaactgcacctgatgcttagagccacatctgcagctgatggactgcacagtagcctgcccaatggcctgcccgagtgaggacacagcaaattgttaaatggatagatttgctatagatgtaccacaaacgccactgccactgaattatggccatatattgtactatttataatcgcaatgtagttaagttggatttattccttttttcagcaaagactcacctgacccttaaaacaggaagtattttgcttattgcaaaaataagtacatatcaaaaaaaaaagaatatttccagatctctcttttggcatgctggctaaggatgggggtgtgctagatatgctctcaagtagcatctgtgacaatgggaaggaaccccttctgtggccttgagtcagactcaggggccaggacccaatccctgccaagagcctttctcaacacaagagaagacatcccttaaacatatgaaatcaaaacagcccccatgttgtagccaggggaaagcgaaggacagctggcagcaggtggctctacagagaaatttcccaggacaaaagtagatctgtgcagctccccagatccaagaatcaccctaccatttcagccaggggggcctgagcatggtgtggtggcactgagctcctggagcctttggaagtagtgtggaaacacccagatgtccttattcacccaactcccaagacagatgcctggagcaaggcacaaggagggggtgctgtgcccagcccttggtcccccgccagcaacagcctgtttgttccctggccccagaaatcacagctctgtacaaagttcctggtctgggcaggacacctccaccaatctcctcctcgtcctcatcttctaaattcccggcattccacgggtccctctccccactctcctgattaacagccggccacctcatttagaaagctaacttttctcagagttccatcctgttcttgaggtttcggttggaaacttggcctagatgacagctgtgtgggcctctccccagctcgacccagcaggagttctaatacacttcattctggggctggttgctgcttttaatctatcagcacggcgccgcagctgctgtaagctagctgaaaattgtctgcatacgggcgaaccatttgtaacccttttcagtgcaaacccacacttcggcagaaatgcactgtccagctctcccacacctacgaaacacgtgggcccagagtggccaagatcttcccttaaaccaagaggttccccacccgaacaaccaggaaactttcaaaaagcctgaatacattattggcttggaaatttcactctcctgacccaacttctcatcccaaggaaagccaaaaggcttcttcaaaagctcaagcctgagcgccagagcaccatcggcccctctcactagggctctgcccaggactcctctgccacttccctttgattctcagtaagagaaaggggcttttctcccctaaggaagcaggctcagctttgtggaagccctcccacgtgctgcccaccctcagaaccaacgaggacctggctcaaggcaacaccacctgattctcaaatctgctggtgccatcaactcaaagggtctctagtcgatctactcagcaacatcagacccatcggggctccgtgaacaggggagggcaggagttgaaatgcttgccaaatattaatagttacagttcttacacaacagccagtacccttcaggcatccaacacaattttagatgtcaatagggaaagagagaaaggaagaaaagtaggaaaataaaatggaaaagataaggatggaaggagagaatggagaggagagggggagggttaagaaagggagaggaagggaggggagagaaagggaggggaggggtgataggaacaaggtgggtgctcccatcagaaagcaccatctatccatccatcaatctatccttccttccttccttccatccatccttaacctgtctttgcaaaccccctggtggtcagtggtaggaggcctggtctaaccccacttccagtggagacattcagaggagaagttgactccttacccccagacttccatcaccagcggaggagacaggcttcctggcttctccacctgctacagaggcccccaaacagcactcatagccacctctgctgcccagtggggagagaggcctggagagggtccttcctcttctaccactcaaagaaggcccatggctcctcccaacctggctcactggtcattagatttctctgcttacagagcagcacccataaaagtctgggtcacccaactggggcaggactcacaccctgctcctggagcagatgggtgcagcctgcctagactctcaccccacctgcagcccagccccagcactggctgggagaggaggggctatgaaagactccatggcccaaagaaaagaagggctgcaggaggcctctggggagggatgtggagctgtgtggtgggggaggccacctcccaaaatgagtccaactaaaaaatccagtcttccctcagaattgatacggcagcagctgtatctctttcatttgagtaattatcatataattaagtgcatgaattacaagagagccaaggcattaaattaaaatatttaatgcttgtaaatctgaaaatgattactgtgctgatgcgcagccagtgagaagggagactaatggcttggcgggcagcgcggggaggtggtggcagcctcgagcttcaccccagaagttagagaaggggaggggaagagggtgtcagggaattttggggagggggtcagcagcaaccttgagacagggtagcctgagcagaaaactcacagctgattctctgagtagggagagccatttgtcctaaaatgagagccatgtgttcctaagctgccagcaacaatagcacagaagaggggtaagacggggtcctctcactgggactctcattgggacagaaaggaatgggcccaaattgatgacatcactcgcgaattaagttttacccctcacaaagtgttcatgttcctgtgtggacaaataaggaattcaaggcacagaaaggaacagagacttgccaaagatcacaaggcaagttgcaagcagggctgaggctaggactagggactctgacaaactgaacctccccacctgtgaagctgtgatgagctagctcacccagctttagctggctttgatgtgacccaggatggcattagctgatcctttcatttcccaagccaacctctctccctctcaggacaaaagggagatacaaagctgccactgcgatgctcccatgatgctgacgcacagctccacaatgtggaaacaggggtgagctttgggtttctgtccagaaaacactatgcgctgcccagatagaatcaggctagacagaccccagaagggttcaaaagaaaaaggtctcccagtcagacccagccctgccatctcggtcgccgttcatgctggccaaccaggaatcggacaacaagcggccttaacaaaagctcccattcccaccctgaaatgcactcaccagggaaaagggaaggcattgaaaagagcccagccccagtagggaggatgcaaatagccgtccagtgcaggtgcaaggaaattaggtgcatgagatgtcaagagaggctagggcctcctctgcccatgtggcctccaccaggtgtggccattccttggcccagaagaccctcccttcccatggacccagccctctctgatggccagctcctgacattccacttgacagggtggacccagctctaagtactcattccactcattcctggaggggagagccggcctatactcctccggaagtggaccttgtttttattcccgccagcatccattctccctccttttgggaacaatgacccaagagtcttttggggaaccaccatcagagaataatggcactcctgaatcataggtgagcatgtgattcaggcctggccaattagtgtattccatgtctctggataaagagactgggtcagggatgagcatgtgactaaggcctggccaatgagtgtatgccatgcctctggataaagtgattggttaaaagatgaacatgtgaccaggcctggccaatcagagccaattgtaagaattttctggtattatggaggttaaaggactctcctgtcatggaacaccatggaactgccagctaagggggtaggatgtgggcctggaggggctggtggccattttccgtaccatactgcaagggttttggcagagagggaggctaatagagaaaaggaggaccaacagctggagacacagagggcagggctgggcctgttgcaccttaagaagccctagtttcagcagcagtgagcccttccccttgttccctagaccagctggaggcagggttccagctcttgcaactcaaaaaacctctgacaaggcatacaaggtatgtatgcctcctaaatcttcagtgcctcccatggagggcttttgtccctttttgtccctctgtctgtctcccttcctgcctccgcctgctctcctgccccacagtattagtacatcgatggtctgaacaaatgaatgaatgaatgacaaatgctgtctgcgcaagcctttgggtccagtgagggctccccaatctctcccacacccattcctattcactaaaattcacagcccacccaaatctgtggaatagctggtgttggatgtcactctgcttgagccactgttggctgcaggcctcttgtcccagcacacacggggagctccttgaatgcaggaaccttctcacatcctcctcgtctgctccccaaagctggtcccagggccttcccaccgccagacctttaactcttcatgtctctactgtgtgaaatgactccatccctccttcaggagtcagattagaccccaccagccccttctagtaaggtttcccagaacaacatccctccgaggaaaacccccgcctctaaagaactctagcacctactgcgcatgccactggtgaccaatcctgttttctccacaatctaccctctcctttccacctctgctaccagcatccttcttcaggccgctatcttttccctcctggatgacaaaatccttctaaccagtttccccccttccagggaggatgagcctgtcctatcacctcactcaacccagaatgagcttttcatggactcctggagaaggcaattcctaagggtcagaatgccccatgggggtcaacatacgaatcctccaagacttctggataatccactgagactgcagatatgaaagtctgcacagagcagatgcccagttagggtcagggttgggaggtgtgttttcctgagtggcagcatggcagagtgaaaagagagccgttttggggtcccataggcttgggtacaaatcctagccctgtaacgtcctggctgcctatatggcctcagctagattactttaagagcctcagtttcctcctctggatgatgaaagtaacagcaggcttgttgcaacagccatggagaatggatgttaagcacctcctctgggccttccactgtcacatggtaggcacttgataaatgggcactgctattagtctggggctggttgtgtggtgtatccctagcctaagtagtggagtgcccgtggaaaaaaagactggcagcttaaacgggccattctttaaataaatgaataacaaaattgacatgtattgggagttttactatgtgtcaggcactgtaagtgctttccatttgttaaattcatttaatcctcacagcagcctaggaggtcagtaataattagtgatatcccattttacagaggaggaaattgatgtggcaggggcgtaagcaacttgcccagggaattcagagctgctaaaggaggtgctgaactagcacttgaagccatctgaggtctgcattctgaccctcctcacctatggagcctgcctgctctgagctatggactatggctgttaaacaaaatgaaataggagagtccttatccctgctcccagaaactcacaaatgacactggcacactcgtgagatgcatttggtagaaaaaggacttctaatctggctctgactgacggagcataaatcatccagcctcaatgcacccccatgccatcgtgaccctttagtgaaggcctgctttgtgcatggaactgtaacaggcaggctctttctttcattatctcattgaactctcatggcaaccatgtgagatgggtgttaccatccccattttacagataagaaggctgaggctcagagaggttaattgcaccatggccacagagcaccacagagctaaaaattaaagcccataatggttccaataaatcaagctatcttcatttatatggtgagttggggggtatttatttaattctttttcttcctctccctcatttttagctcgtagggagtcaagagaggtgcctcctaatgaagaatgaaacagtttgctataatttgctccaaaacagtatgcttaattaccacaacctcttccccaaccaaaccacttaattgaattcagatagcatgtttgatgttatatataatatttggcaacttggccctctttggggagtgtattgattgaggaggaaaacagatgttctggaagatgtttccagatcatagctggaccagacggctctggagtttaaaagattacagaagtgcaaagagagtcgtgataccaggggccagaggccagggcagcctccatcccatcactcaccagaaggccacccccagcacaagtgtgtcagcagaggtctctagggccccattgccaccctcctccaggtcctgcccgtgtgctggggtagagcaggcaggagggtcaaaggcatggccatgcatggcctcctgagctaacaggaaaagagcaggagggctggatggacagacagatagtatccctggtctggagaaggcctaactggaagagtcattggccaggcttttccaacaaggtgctgagccttcttgatttgcttgggttttttggtttatccaacaagaatttgctaggcatctatagtgtgccgtccatttattcattcaataaatatctactaagcacctaccttgtatctttttttttaatccatttattcattcattcaaaaaacaagcatcaaatgtttactgtgcataaagcctcaggtctgggtggtgcctgcccaccaggagctcccagtccagccagggaggaagatattcaccaactgtacacacgagtcaccacctaactgcagcctgagagatggatgcccaggagggtagacaaaggggcagctgctccgagggcatcaggcctgtgtcttggcaggtctgacacgtggagcgcaagtcccagaagaggaacagcatgcacaaaggcctgtggctggaatgcagagtgaggggcaagtgtcagatggaggggaggggaggatgggggtgtctgaccactctacagagacttgtggcctacactgagggtctctacctaaggacaatgggagcgactgaaggctccagacagggagacacattcagaaggccacttccagttcaccatagagaacagatgagtggttgggagcgtagaatagaccagaagagcagagaggatgcaggttctgactgcaagttcagaagtgaaatgcacagcccctccccactcgaacccataggtcactccaaaacagggacaagggaacaggcagctgccctcctagatgaccaacactgcagagggcaagttgggttttgaatttttactattattcttgctttctttgctccatatttattttgaaattacaaacattaaaggagaaggtaaatattttcattcattcttccatccaaaaaatactgattgagcacctactatgtgccaagcaccgtgtgtactaaggggcaaacaacattcaaggccttttaacccaacagtcagaccccagtagccctttctacaccatcttagacacatgtaactaagtcctgaactgccgggttcagaaacagcacctactatgtgtcaggcactggacagtgacctggagtggagacaacacagacctgcagctgcctgaaatctgctatgagcaggagacttgcaaacaggagccagaaacatgacaattccctcggcagagggaacgtcccatcccagtgggacacaaggacagaccccatgagtaaaaggagggagaggcattggagcaggaccacagagagtgggaaggattttaactggggggagtgaggcacatgaggtgaaggtgttttccgcaggagatggcatgcacaaaagcatgaagccaaagcacatgccaaaaacagtctggaaaccaaatcacccactctggctgcagcacaaattggaaaccaaagggccgtaacattgatacctagactgggccaagcacagagagcataagatagctgagcaaaacagtgggcttctttctacaggcactgaggagcccactggagtctttgagaagtggcatgatcaagtgtggtacttccagattgtgagtaacggcacgagttgggaaaggctgcttgtggggagaccagctgacacgccactaccatagctcaaggaactgtgaggaaggtgtggatggagcaggtggtggtgctacaaaggacgagaacatgaggcctcccacagtgcacactggagagggatgctggcaatgggaggaatggaagagcaggtcctaggcagagctgtggagagactcaactgttgtcataatcctggctcaatagtctcttacagaactcatgtgaccaactcatgtgacctgggttaacttaggtttctactggttgagaatgatatggagtgcatagtacatgtaggctctccataagggagagcgggaaggtttggctaactagtggacaggtagatggatgaatgggtgcggagtgaataagcaaatgggcgagtgaatggtgacttaaatatttggatggatatatgaacatgtggacgatggatgatgggtggatgaatggactgatggaaggtagaagtgggtagaggagtaaatggatacatggatggaccagtggatgcatggatgtgtggatggactgatgtatgtcctgcagtaactcccagcagaacatgtctagaggatgctgggagactccaggccagtgaatatattctgggtttataaaccatggggtatctccttggcttacctaatcacttccaattgaaacctcttctctcccagctccattgtcttactccattttctgttgctataacagaatgccacagacaagtaatttatcaagaaaataagtttatttagctcatgattctggaggctgcaaagtccaagagcacagagacgacatctggagagagcctccttgctatgttgtaatgtggcacagggcatcacatggcaagaggacaagtgtgtgcctgtctactcaggtctctcctcttctggtaaagccaccagttccatcatctgggcctaccctgatgacattatctaatcctaattacctcccaaaggccccacctccaaatgactcaacatacggattttgggattaaatctccaacacatgaaatttgggggacacattcaaaccattgcatccatcctctgcattcagaaagatagtccaacagaaagatctggaatcaagagacccagctgattaccaattccagttttgctctgatgtgctgaatgaccttagacaagccccttcccctctctgggcttctctttgctatccagttcaatgaaggaataggactagatcagggatgcgtacatgtggtgagcctgctgatcatccccacgccttcatccatacctcacagcaagccgtaccaatctctaaggaatcactgcacggctgagccccatttgccaggtgatctttaaggaaagtggttctcaaactttagtgaatcagaatcagctggagagtcttttaaaacaaagattacaggctgggtgcaatggttcacacctgtaatcccagctctttgggaggctgaggcgggaggactgcttgaggtcaggagttcaagaccagcctgggccacatagtgggacccgctgtctacacaaaattttaaaaattagccatgcatggtggtacatgcctgtggtcccagctaatcaggaagctgaggcacgaggatcacttgagccaggagtttgaggctgcagtgagctatgatagcaccacagcactccagtgacagagcaagatcctgtctctaaaaagacaaaacactgattgccagtcctcacccagagtttctgattcagcagttgtatgtggggctgggaatttgcatttctagcaagctctcaggtgatgctgctgctgatgctgatgctgctggtccttggactctacttggagaaccactgatctagtgacccctgctctgagagtcttggtgaaacctagtaggtatccccatgtgggggacagcttgccatacctaagactggaagcctgctggagccactgttgcctcctgtcattcaaaggcatccttgaacccaatgacaggggcactctccgcctacagccagctgcactccaggtcgtgcatcccacctcgccctgccctgctccctcctgctttccctctctcctggagcctgggagagcaccaggccttctgctgcctgtgtgctgcctgcccctgctgccctcagaacagctgtgggcttaattatcaaaataacattttaatagtctcataactgaactcccttcaaaacatgccagcggaggaggtgggaaggattctttttagcacctcttcccacccgacttgctaatcggaggcatttaaactgctagaaggcccagatgcccggccctgcccatggagcccctcctgccaccaccaaggatgcagcttccacaggcggatcgaggggtcgggcccataccagactgccagccggaaccaggagtcattgcaggagccacactgcaccttcgtaatgagaagaaagtggctcattcacgcgaacccaggcatcactcaggaaagtggatatgctaagagaacttaggcaattcatttgcgatcaccaggggtttcacttgctttcaacacattttttttagatttaaaaaaaactgctatcaccagcattaactctggctccccgtctccctgccatttcatgtaataattccacggggagtcctggcgggtatttagctcctaatttaagctccactaaacaagcccaacgcaaaactagcttctcagatcagcagtttcccctcctacttgccgcagccccttcactctctaggttcttcaggcctctaacatcacatccggccagcattcacaacacccgggctgtgagctaagtgcagagcatgtgttaggagtggctgccccagtcctcgttcagcagcacagggagataggcccgactgtgcctaggaggaaatgaaaccaggacaggccacatccccaagctgtatggctagcagtgggtggggcttcgacagaggccaggctggagggcaccgtgctacctccggcagcatttgccctgggtgtcccgacttccaagccagcccttctcaaacttgactgagcatgcaaatcacctggagctcttttaaaaacacggattcttgtttggcaggaccaggtgaggcctggcctttggtacttctcgcacactctgagacactgcagatggtgtaggtcactggcccacacttggaggagcctgaaggaggcacgggctgccctccagggtggttagatcagagactgagtgcaggctgggagaagcaaaggccaaactctgtcttagggtggggtcctttttctcccctggctctctcctgatcaccccagatagtgctcctgactcctgggagagacagaggggcagggctatttcaaaggtcagtgttctcatcttaccctgttcatcccgtttctcaaactccatacccagacatggaaccagaagtttcctttgctctctggaggaaattgccagaaccagacaaatccctttggccctcatcatatttcctgctgcccgcattgaccacttactgtataccaagatagacactgggaacactgggaacagcaaccgtggctgtggtccctgtgctcaggcagctgactggggtgcctggccagctgctgtccaagggagctcatggtgccaggtgaactcgtggtgggggcaggggcagaggcaggggtgcaggcaagagcagtagctgggctgggcactgccaggtgccctgaaccttgacagagtcaagtctattgagtgttagccccaatgcaactacattcactaccaataaaaacggaggccaccatgccactcgtggacactacctggaggcaggcactctttcacagacttgtagactcaggccactgcagtccgtagctcaaggccaacccttagcaaattggcccctacccatcagaaaactggtcctgttggaaaacccccagagcccaactctctgctgcccacacagtctgccccagtagagttcagagccctgaattcaagtcctacctttgactttccagttgctgtgaccttgggcaaattagttttcttctctgagctgaattttttccattggcactgggtgtgattcccagggtctagcccagagcagatactgtatgataaggaatagatgcgcatatattctttattatatgtagtctttgaagtgaaaggcctttacctttttaaaaatgtagtttaatactattcaatgaagcaagtgattactaaacatttaccaaatccagaatttgggggccagaaacagagggcacagatgagaagacaggcaagtccctgttctcaaaagaatctggaaataactgagatgtgccaaatggatgtgacaacattaaagacaacccgggcagacaatgaggcagtaaggttgggtgtccaaccacccagggcagacaatggaagacctggggtcaggccagctggcgtgggggggtggggtccctgcaggagcggtgctgtgagccaagtctccaagaatgggaaagagttgtaggaaaagaaatcaaccaccacagccataataatgtcaaacatttatgtactcattgctactccatgtcaacactgatctatgcactctacatacttagcttatgtaattctcactagcacataaggagagggtaccgttatcatcaccgttttactgaggagaaagcaggcacagtgaggttacatgacttgcctagttgcccagagagcagagtgcagaactgaggctcacacccagacagacgccagggccccatgtccagcaaggcccagcgaccagccaggagccagcatctccacaaacagagaaaaggagggctgggacatccctccaagcagggtcaaaagagaagggaaatgtggtgcaagacttggaaggtaaggcaggcagtccagcagccgctcaacttgcagcaggtaagtgcaggaggagagcaaggccaggaggtgacttaaggcctgcaggaaaccttgttggcagccacaggcagtgccgaccctcctcactcatggagagaaggatttccccacgccccactgatggcacaagagggagacctccactgtagaagcagcttctgtcctccttccaccatgcaggtgcaagaggcctctccaggacataacagcctctgtagttcctatttgccagcgatagagacccggctcccagccaccctggaccaggctgcctctgaaactctgcactcacattgcagtaaaggccagtgcctgcttgacctagacacatggcaggcacacactgtgggcaggtggaagaaggcggcagggggtgaatgtccagcacctgcatttggaagaaaggcaggatcaacagagcctagagccacagtattccaagatcctcatttctctgggcagggagctgggcatgccattgtccaaggcttttgaagccacacaaatggcaccagtcccagtaaacatcccccaagacaggacgggaatctgaatccttgtctgcaaatggccacctgccagggacccccttcagcaacaagctccctctcccaatcccagaggtggcctctgtccagcctatccatagcagctggaacaaggcatcccagccccctggctccagcgggggaaggactgcttccatttgctaagggtcttcttcatttccttcaccttctcacaactgcactttctaaaacaggatattaagggaagagaaaccgagggctttggggttttttagcctctgctccagggaaaaacagacactcatccctgtctgaaattgcttcactccgagagcttgtgggccgcgggagcctcccgccacagatgagcagaaaacagagtttgtttctctatttcccagccccctcgcctctcgccctctccttctctctcccacctcttcctttctgcctggtgcatggctgggagctgggaccttgtggctccacacggctgcctggtgccacggagcagggcatgggctcccacagtaggcagcctggaagggagggggaccagcagaaaccctgcccacttcctcccacactcccgaaacccctccaaaccagtcatcaaataaccctggacggaggtagacccaaggaccttttgttccctgaaatattcaggttttcaggtcattctctggccttgccaggaatgcagtgtactcctggcttgaacaaaatgcgctagtgttaaaatattcatctggttttggttgggactgagagggtgtgtgtgtttcagggaaacaaaaacattattttccccgcttcctctgctcccaagcatacctgggaggttcatgctccaccttgattttggcaaattcttttttagattcctccatgttccccaggatgcagagggtgggagagacacagatggatggattcaactagttgttgcttctccaagggaaaggggagggatattagatattttcttggaagttaattcaactcgaagctgggcactgggaatattctgtccaagcaattactccctgcccccccacccccacccactgctgccccaccccagcccctggtggtagctgcctaccctccagaaggtcaggtgcacacatgcccactgaccagatctccatggggcaggacccctcttgggccaactggaccacactagggccctcaggatcctttaattatcagtcactccacttcccttccctccgctccttagtcccagcacagaaacctgtcaagcgtccaccctgaggactgggaaaatcagctacctactggccctggtctttaactaaaggcttaagctaaattatattacagaccgtggggagcttgggagtggtggctggaggaagggctgttgttgggcttgtggggagacagaagggagggtccaggcaagctgagcgtgctggcatccacttctcaggaaaagctggggaaactgaggcttgcgtaggagtaacataattcatgaggggctggggaggcagggaatccagccagcccctgctccatcctttctcaaggaccaccataaagggttccaaacagtctttggggaaagaagaagacaccccaggtagtcagtcctgcgagatgacctctcccatgggagggcacagggagggctggcagagggtcagctgaagaaattcagtggcccagagtcatccagaccaacacaccttcctgcctcacatgcagtttaccagtgagtttgtccacctacctttcaaattataccttgacgcagcctccccagccactgccaccaccatggactgtcatctccagccagtacagcagcagcagtggccacccacgggaccctgagcttccacccttgctcttggatgttcccatctccacccagaggccatagcaatctttatacaaacttaaaataggaaaatgtcactcacagcttatagtcctgcaataatttcctattgcagagaataaaatcccagttcttggccacatcctggaaggcccaatatctcctgggctctgctggcctctctcacgtcatgggagccactgtcccggtcactccccacactctagccccacacccagctggctccctctcatcctttaaacctcagcttgaccaacatcctcccaattttccctatccctgcaccaataacacgtctcttagtttgtaattatgtatttacttgtttgcctgtttattcctggctttcccatcaacacagtaaactacacagaggtgtggaaaatacatgtattcattccccagagcccagcaaagcgcctgaagcagagcagtctctcaaatgtttgttgaatgaattaaagaacacaggccttccagttagctcaaagcagaacttccccattgccaagggatgaagaaaggagagctttgaacactcaagacccgtagaaacaaatattcttccaacctgtgatgcatatcaatcttccttgttccttcttaattcctgatcacatttggattcagatatttaagaagccagagaagcaaatgttatacaatgccccgagaaggccccagagattccacattcgagggtagaaaagtttcactttcataaagcctaataaaatcttgcttccaacgagcaggcagcggagaacgcattcagagagcctacagggtgctctgtggatcgtgagagcatagaaacgtggactgtgaccagaataccagagttcacaggacccaccaggaggacagcccgaggcccagccaggcccaccacatgcacagaaaaagggccctgagagttcacgggctgagtagatgtacgctccagccgtgatatttataacaataaatgattcacgagattgccacagcccacctcagtcctccttaagaaccgtggacaaaaacaaacacatactcaccacccgctccccaaaaaataaacaaggggggaagagaggcggtatgttcctccagccccactgatgtgggcttactcattactctaatgtaatcagaagaacattaaacatttctaaagtctcctctcttttccatggctgattaagcaattgggagcggagagtttactgtgaaaaaaagcaaacaattatgtgctatccgaggtaaacattaccttagtaatggaagctgagatgcgcagccccatcgtcagtagggattatcattataatacttaaaataacatttataacacttactgaaattacacgaatgaagtctgcagagacaccgaaatgaaatcagctcaatgtgtttttataagaatactgaaatctctgtcccttggaggaaagttataggcattaacagtttttgctaggcctccattagctggtaaaatttgaatactgtttcttaggtgagctctaatcttctttgaatcctcccaacacattttatctgtaaaaaattgtagttaaaaatttagcttgatggaatgatatttaagtgcttttcctcatctaactccctgaaagtgccccagagagtctccctgtaatttgttcaaacgaaataatattttcgtttccccgtttctctttgttgtcttgggtgatgaaaagtaacatttcttttctttcaatcctattaagcaaggctcgaggaatgccagccactcaatccaaatgcgatctggcagacaggcactcagcttaaaaaacgggacctgccaacccgggtttctgtcaggagctgacatgtcaccaggcgtcagttctgtgcaacatttcccaagcaataaccagggttatcagcaagctgagtgagttttttccttctctctcgctctctttattttggttgccacgctgggaaacttggctcaaatatctggttagttgcacctactctgtctgcacacccatgcaactcaccacgctcacatagtctcctgagcccacctgacgcctacacgcaagctggggatgcaagaaactgtcccattctccaactgcagaacttcctcccaggggaagccccttccaggcaggaaggtgcatgagatcctactctgttcccttcctgaatccattgagtctcctattcctcttctcatcccccatggcttccttccatattgcagacattgatcaaacttacaaactccaagccactcttcaaaacctgttataaaatgtcacctcttctctgaagccctccccagcatccgagttgtatctgtgctcccattgcattctgcaaatgcttttacttcatccagaaaggtgtgattaaataagttacggtgcagccataaaataaaacactatgcatactctattttttaatgaagcagaaccaaatgggttgaaatagaaagaagtccacagtgcaaacctaaaagcgaaggaagcaaggtgcagaataaccaatgtaattgatcccatctgaataatacatggaaatgggcataggaaattcttggaggcacataaacatcaataagagtggtaggtggcttccaggcagtggaaactgagggaggagtcaagaggggttagagaaggaagaatttatattcttctatgtattaaaatgtttttccacaaatatgcattacttttggatgaaaaaacaataaaatcaacctatgttgatgaaaaaaacacttattagcaccattttgaatttctacatttaactcactggaatgaatgctatcacaggataaaccactatcaccaaagatcagttttatcacacaactttctaaatgacccatactccctatccatatgtgaatatcttgctgacatcacaactgttaatttattgtatgtatggaacccctctgaagatgaaattctcttagcgacctactcaaaattgggctctgccttcccctttctgttcctgcctggctggtaaacagaaggaaaggccagccaagaagaaccacgatgagacctcagaggccacctatggaccgcaattttggacactagcaaagggttaggacctaggaaccttcctggactgatgggaacaaatggtcatgtgtttgaggcattttggccaacttgcaatggtgggttttttcatttcctgtatgttcctatccttggatgaaagaatagcaagaacagtatgaccagggatgctggcaggacactgacatttgggttttccagataaagctgccatttgacattagaaaagcatcttgtgatgatgctaatcacaccataagtggggaaaaaaagtcatgatggcagcatcattcccattctataagaaatgtctatggattctaaatgatttgagaacaaatacatgtgcgcaaaaatattaagcctatcaattttattctaatgacataattttctttacagatgcattaaccatctacagaagtactaatgactatgcatatttcatatatattcacacacacatatatatatacacatacataaatacatatatacacacacttatatgtcgtcaagctcaatgaccattacccagggagaaagggtggatactgtaccaaatctatatccaataatggcaagtgcctagcaagtgtgacatagtgctaatgaacaatcaataaaatatattgatcaggtttaggctagtggtcctataaccaagtaccacaaccttgcaaatatcaactatctgtccaaagttgggaatccaaatgttttctgctactttgctaagttataagaaagctaaattcttttaaattatggactggagctaggggcaggaggaagttggagcctggggtgctcaggaatgtgtcagtcacagacccagcttgttcactgagcagataccagccaggcctagaagatgctagaataagctctgataaccacaaagcattgtcttccaagcttaaaaagtcccttttgtaaatattggtttgtaggcaccaacacccatgtgcttagagaaggaagatgcaggaatgcaaacctctcccacacttcccatgaaaatgagagttatagctggttggtgcaagggtgtaagaggcctctgtggagcccatttcaaatgacaaagaagatccctcccacagcccccatcgtgtcccttagtagctaactggatatacgaaagaacgtctatctaatcccttttaggagctgggcctctattgtggaatgaattggagtggctgctatctactgcctacgcttagggcatcctgtactttgtccaaaaactgtgtttttcaagctttaagggggctgctgaactttggttttctgggacttttccaacagcccataccacagcctccccgagcctcctagagctataggaattgtctgtactcatacgctggggctgccataatgaagaaccacatgaagactaggtgacctaagcaacagaaatttatcttctcacagttctggaggctggaagtccaagatcaaggtggcagtgtcaacagagctagcttcctctggggcctccctgcttggcttgtaggtggccaccccctcgctgtgtcctcccatgatctgtcctctgagcacatgcatccctgatgtctctctgtccaattttcctcttcttatgaggacaccagtgagattgtattagggcccaactgagggcctcattttgattaaattacctatgtaacaatatgtaatttattgttcaatattgctacatattgcttcaatatgtagaatgcaccgggaacataattcagcccagaacagtgtcttcttgggtctctgttattccggaaggaaggagcctcagctgtcttgtctgtgtcagatccagagcctcctccccggcactcacttcattagctaagtgcaccaggctcctctaagcactgccatggctttctcaaggcagaagggtcagaagtgctcatgaactttcaggggcaatgaccctgactgtttctccccagccaccctctttctaaattacctttaggctgtggcaacagggacttgaaggtaacttcatccaatctcttcccccaagaccccctcagggtagcaagacctgatggattggaagaccttgcagaaggaaaattatgataataaagagccgtggctgcccccagaacacagatcaggtgtgggtgagaaagcgctcaggaggcaggcactgactcggcctctcagccccctgaggagcagcccacaccttccctcccactcccaaggtcccctcaagtcccacagctaccaatggagggtcagaccccccacccccacacccatagccgctgtacagccagccattgttacacaggcctcgatggggggatgagagtttgggaggtattttttagttgcatgcattttgaaaaatttgttcatgtgtgagatgcatactgcctgtgctacagagagcaggctttgcaatctgaatcggcaaatttgttaactgactgttgagtctaatgttataccactattctgcctctcgttagcaacacaaattaccggcaattagccggctgactgttcaaaggcagttcaatttcatgtataaagagaactatataatgcttaatgtatctatcaaatgtaacagcccaaacaaaattaatgatatgaatacaatgagtgcttataagggataattacaaggtgtccgtcatgagaggcaagccatggagtcagacgcacaattcaggcaaacagtcaccaaagttctcaaggctggcctaggctgttaggagacggaaaaggaattgtgatccagaggaggctcagccctgtcactggacagggtgggaaagcaggccaccgtgacgtctgaaatatacaactgtgatttcaagccctgagtaaaatgagacagtgggctccatttcctcatctgtaaaatgggaacaatagcatctgcctcccagaacgctaacctggcacaacacaaccaaacagcaacgaaagagcactgctaactctcctggcctcacctggaagaaggtggtgatgctgttgatgttcttattattacataagaatttccgaggtgaggcccagcagacctcttcccgcctgcgtcgctgacagagtagcgtggcgtgatacaaacgacacttcgatttaattaccacctttttttttttcctcctgtaactaaacattttcctctgctcagtatccctggaatgactgggccattcccagtgtattacttgcatatctataattaaataattaagaattgttcaagcccttccaaacacaacaaaaggcgatgattatttcaaagccactttaggaagagtcaagcccctatcagctccattttttgctaatagttatgcaaggctgcaccggcagcattccctcttgcatgccagcacaccaataaattaagatattcctggccgcatctgcacgagggaaattagagcattacctggtccccgccagtgtgccagctccgagcggcaggcgcagcccacgctgggcgaccagctgtctgcgaatgtggcgtgtggatcacagctcagagccaggggatctcttaggaggtctgctctaatatcacaactgcctcgctgcaggactgttcccttcacagcacagtattcaaacacttcttccgcctctttctttccaactccgaaccagggagaaccgggagctgggacctccgagccagtccccggatgccaacatgagcctggctgatttttcttgttcacctcggaatccttaatggtgaggacagcaccaaggcactttgttttctgaaaccccagccccagctgccttggaggaggggcaacctcattcctggtgggtgtaacttcaccaggcacaatgtctcgttggttttgatgagggacaagtagcccctgtgaagacttaacagccaaaatgattccacaacggtttacacaagcacaaactcgctgtcacaaagagagggaaagaccgattttcccagaaatgggtggaggctttcagtttgggaggccaagtcccagggtgtgtaacgtcttgagggtcaatatccagtttcccatgcgttcctttaggtctgaatctctctccctctgcagagctcctgagcccctgacaatgacagacaggccttggaaacggtccctgtgctttagacaaacaaaagcaaaaagaatgaagtgccactgaccctgcatttggcgaatgttcgaggcatccagatgaagcctctttggcaaaataacctgaggtgccacagacctggatcagagctggggcttggcaggtgggaagagtgaggctatgaacatcgggggtccaacaaacatgtgggtaggggttgtggggacaggtggaaggagctgatctaggagctgctgctgagtcagaagcactgagacaaggggctttgacactggtgtgggagagggtgaagacagtttcaggcagctggctgttggggtggaacaggagagagaaggaagttagggctggacaccattgatgagggttttcagacatgcctgaggacaagagtgtctaaggagtagtcaacagggtctaatggcctggaaagactataaaagtcatcaacttctacaatcaggagtcaccggtgactctagcaaaaagaatttcaaagagcatcatgctctttgcaatgcctctaacttttgctgtacttatcacctaagaattatctttcactgtttcttctggtgaactcttattcatcactttagagacccaactcaaatgcctctcctctttcaaacttccactgaccaccccctatcttcacatatctattcccacgcacacataaccaggacaggcaatcacttcctaacccattcatactacttaggaatttgcacatctatgtgtctacctctcccatcagattggatattcctctaggataggagctgtgtttgccttagctcagggtccccagcaaacagcaaaaagcctggcatggagctggcagaaacagaccagatggcatgagaggaaaactattccaagcctagggtggagagtctgagaccctgtgaatcttccctgctgcagtaggctgcctcagtaagttgtactgggggtcaactcctgaaccaacagggccagaaaccagaagaccatgggcatccatgtgtttgtactcagtgcatgagatgaacatcttcctcccagggcacactgggggcgtctgtccagaggggtggcagctggctcccgaccttacatacgctgaggctaagccccatccccaaaggacagagctctcaccaggtcccatgaggcccacaagtgaaaactggattcttctccctttcactccatctgggtatgagctgttgcaaattatgctgcactttcttggcttcatgagcaggttaaattccacccaagctggtctcatcagtacccaaacaggctacatccttctaaaccttttctgactattccatcctctacattctctttcccatcaaaaactcagactctagcatttaatcctaaactgtttataacatgagatgttttacggtagctatgtctgcctcccaaatatgttgaaagcttctagagggcagcaacaaatcctatatcttttaaaatatctacctcaatccaaagccaagcaagaatatttgataggaaaatagtgggaaagtgctgcctgctaccactacgccaccagtggcagacatggccaaacaagcacctatctgctatctcatgatgaatgattcatgcatgcaacttgatcacttctgccagttttatcggacagctgctctccaacagaactggaaggagctgtgaagtgcatgacttcaaggaggccccaagaagctactgctcacagcagcaatgtgcttggatgcagcccctctctgaggtcctccccagcagccctcctctgtcaacaactgaaggggccacagaaaatcaggagaaacaaagacaacagccaccatccccattcttggcatttcccccaagagtcactgaaacccctcttcccactccacattccagtctcagtaggtcaaagtccatcacaaaggggaaaacccagctctctaggatgtgcccttgtccaagctttcccactgcctacccaaccaaaatcagacaaagagataagacaaaaggtaggaactcttgagccatccatctgctgtctttaatattagtttataaacatgatttcttcctcctctgctactcgctctactctgggcgaagaaacgtagctcaagacctgatctgggtatcacttttcaaatgcccaaatccctgtaaaggtttagtgtctagctgtgtgcattttgctcagtattaacatgttcaatggagtactttgatttttttttttatctagacgccagaagctggtgaatatatgcttcatagcttcagataaaccttttgttcttctggggctgatcagctggtggagcagcgagagggagaaggggaggggaattcacaggggctcagcggtttcaaaaagtcaaattacctctgagccatagcaaggctgataatttaaatgaaaaaatatatatacaggctgcagcacacaacatcgtctctgttaggacttttaatgaagccccagttgtgatgacactgaagccgggaacgctacagtgggataattacttggctcccacacagctgagttccatagatgcattattaacggcacattcctcgccataacgagagctgaacagaggtaggctccgcagaccttggcgtccgccattagcggcctggcgcaaacacaaatgagtgttttcacaaaagcatgcaaaggttgtgaaattccaacgagtcttgagtcttgtgctgggaggtggagatgggatggggtaaaggggaagtggcgaatatatatatatatatatatatttggtccatacagacgtgaccagagatgtcacctttccctgcgcaaggtacttggagtaaggcaacctgggaaattatggagtcagaacacattgattttcccgcagcagatccaggcagcagccctgatgaagaattacagaagaaatgcaataacctaattctcctccaacctggccctgctgcgcctgcagccctaagcgtacctggctggggctgcgggcagcacctcctgacccgggcatgctgcacagctggactcccgtttggcactgccgggcagtcccccattcccagccccggctcacacccaagccacagcactcacaccggccacgttttcaagacatgcaggcatcacggctgcttcggggggcaagggtcttctggaaaagagaaagccacagatacgggcattcttgctcccagctcaccccaattaaaagcagggataaagacacacactcattatcacccagggccagggagagcctctgcacatcccatacaggagctccagggcaccagggtgacttagccaaggctggtgggaagccgttcccccagccctgtgcttccccttggtcttctcctcgatttctcttcccctggaagcgtctgtttcaaggtgaccctgtttcatgagttagccccagcgtcccccgcctgctcacagaaccaggggcctcccagtaattaacacccgcacttgatgaggtccagctggcaaactgaagcgatgccagcatcctcacaccacaacctgggctccagccggcccggtgagggcctttcccccaccaccactctggccactctgtctccagagaaggaggggaaagtcacccatttggttaggatgatgttcaatagagagttgtttctaatagtgacactactaaaagctccaacgggaaatttaaactgtggcacttcttataatggaacaccaagcagccactaaaaatgatgatgtagagacatgtgtgctgacacagaaaactgtcactgcctactgttggggggaaatgattacaaaataatatgggcattgtaactccactggaaaccaaaccaagtgtgctaaaatagtacggacagtataagtccactgcaaactaaacacaagtgtgcaaaaataggatgagcattgtaactccactggaaaccaagccaagtgtacaaaaatagtatgggcattatgactccactgggaagcaaacaagtgtgcaaaaacagtatgggtattataagtccaccacaaactaaacataagtgtgcaaaatagtataggcattataaccccactggaaaccaagccaagtgtgcaaaaatagtatgggcattgtaagtctactgaaaactaaacataaatatgcaaaaacagtatggccatttataactccactggaaaccaaaccaagtatgctaaaatagtatgggcattataagtccactgcaactaaacacaagtgtgcaaaaatagggcattataactccactggaagccaagccaagtgtgcaaaaatagtatggacattgtaagtccactgcaaactaaacacaaatgtgtaaaaatagtatgggcattataactgcactggaaaccaaacacaagtgtgcaaaagtctgtgcattataactccactggaaactaaacagtatgggcattaaaactgcattggaaaccaaacacaagtgtgcaaaaacagtacagacattaaaactctgctggaaaccaaacatgagtatgcaaaagagtaggcagtgattccatttctacacaggaaaaaaaaacaggcaccactgtctttgctgttagaagtcagggttgtggtcctctgggggctgggacaggaaggtgcaggaggtgaacttctggggtgtgggtcacactgtgtcatgatgtagtgcttacctgggtttggtctgggaaaattcagcaagctatctgctgcttatgacaagtaagcttttctgtatgtaatgcatcaataaagggttattacattaggttggtgtaaaagtaattgaggtttttgcagttgcttttaatttctatttattgatatgtctacttttctgtataaatatcaaactacaacaaaatgctttttaaaactgtatctatgcatgtgtgaacacacagaattgggaaaggtaaacatcaaattgttaacagcagttttccctgggaggtgagattaagggtgatttctatctctttcttctgtttatcagcattttttttcttgtaaggaaagtgtattatttgagttttttaaaacacagcttttttaaaaacaggaggggcagttcagctgaaattataaggaacacagccaattaggaaaattgataacaaccaccacatcatcatctactcaacaaataaagcataaaatgcagtttgggacctattcgaccccagagtcttcttaatgcaggctcccctaaaacacagtgacagaattcttttgcagaagtcacttgcaggagtgaattctttttccctggcctgggccataagccatgaaccaaaacgtgaataagacagctctgtgtgccagggcatcgctgtaaagcctatcctcgtcacccacaccagccgggagtcagccacgtgcaaccagagaatagttacacaaaagacaaagcaggcaggaaactcaaacccactcagcaaaggtgtgtgatgcccccacctctgccagaaccggcggacctgagggctatcccctcgcctcccctccccacatgctccttgctcattttagatccatttctaacagatcagtcttcactctgcgatgcccagattcacaggctcaacttctcactgccatccataaacagggaagaagatatgttagcaaggtgtggagagacagctttcgtgcggttgtgggtctggagaagggtcagtcatccaggtgcagtcatcagctcaccctccccaaaccaaaatccttcaaatacctgatcaagatggatttggaggaaaggttgtatgggggagtgaagagaagggggacccctggtggtgactgctatccacagcaatccagctctgaccccaaactcatccccaccccaaagagccaaacctctgggctctgcgtggtggctcatgcctgtaatctcagtgctttgggaggatcacaagaagccaagagttcaagaccagcctgggcaacatagcaagatcctgtctctacaaaaaaaatttaaaaattagccaggggtggtggcacgtgcctgtggtcccagctactcaggaggctgaggtggaaggattgctggagcctgggaggtcaaggctgcagtgagctatgatcatgccactgcactccagtctgggtgacagagtaagaccttgtctcaaaaaaaaaaaaatttctctgccattcacagacctcactcttgtcccttagaggtctcacccctgcctctcccgccagaaccctctctgaagtctggcggacagggtttgcagagatctctttctggtgggattgtagcacctcccacaggtcaacttccaaactctaccctgactctctgcctgcaaccaagccatatgccctccgtgcctttgtttctccatctgtatacatgaaacacccaagccccaagcctgctcacagagaagggagaatggccttagatctccgagaagcccccaagaccagcaccgctggtgtgggacctggaagaaatccacttcctttgcaaagtgagtaaagcttatttaggaaagcacaaggttggggagagggggccgcggaggcaacacactactgaagagaagaccaagaactctgccaggggctcagaaggcagcagaaatctctatctgtaagaggctcctcctggccccccatggaacccgcaggttccccagaggcagcttcctgtcccctgcaggagaacaggaggaaatgttgtcctagattactggggatggaccaagtcaggatagaactcaaaaactagcagtgcaaagcgagtccttgagaaccatcccctcccctcagccccccagctgcctgcctttcagctggggggtaaacagaagtggggacatatctggattaagaacccagagcagtaaatgttcccttccagattgtgcagggtgttagaccctggttcagttgtctctctctttattaaaaattccacacttccctcccatgcgccatcccctctggcccctctggaatctcttccctgcctcctctctcctctccttccatcagaaagtttggtggaaagagatggccacacccttgcggtaacacagccagctgcctccaagctgggaagcccccaggcctctctcaacagagggaatgcttacctctctcacacagacacacacacacaagtgcatactgacacaaacagaaaaacacaggcatacagaagaggggttcactgtcacacccaacatacacacaacacacagacaggaatatagagacatacactccaagatagacacaaaaacacagataaacccacagatccaaatacaaagcattaaacacataagaccacaaacacactcaaagacaaacacaaagcacagaaagaagcatccaatgtgttagcccaaaaaaacacccacaggcacaaagacatctaaacccataaacagaagactcgaaacaaactcacggggatgcagatggacaggcgcaaatataacacaaattagagcacacacggccaacagcagcaagaacaacatgatacacagaggccaccactcaggctcacagacataccctcaggagctacgacaggcacacacagggctgtcaacgcagatgtcttgggagagcaagagggcggaaggaggctggttcttacaaaactggaccttggtcagttgctcccaaaacacagacaaggcccagccaggctctttcagaactccttggcatcctctttcttgttttggtccttaaattcctctccaccccaccaccttggccattttcaccctgaacacccgggtgaccccaacagcacgatctgcgtcacagctaaaggcgggagggcagggagtgctgctgaggtgggggtgggggggtctctcttgtgtcccctcctgttggttttcctccccaatgaggacagtacaaaagaggggctcaagaagttagggtttccctgccactcccagctccagatggagctcacatgtggtaaacccacactgggacattgtccctggacatacttcagtggctacagacagaggctgaaaatcaaggtcaaatctttccagaaaccccagggctaaactgccctccaaacagcccctgatcctgcctgaacttaaattcccaggcgcactcactagcatcttcctgccttcccagccacagaccagcttagcctgactgattaatagggagagatctgcaactcatatttagcactcaactggagggattcacaggtaagaattctattttaaaaaataaagtgcccaccagtacctgcatccaatgataggctaacaaaatttttctgtgcagttagttctgaaacagtaaactaagaaatgaactcaaaaaccaaacccagattcactaatcttgaaacatccaccaaaatagcaccaaacttttaaaccatgctcgcttcctggaaaataaaaatatcaattgtctttttaaacctctatagtattttgtcaatatttttttattacagcagagaatgtataaatattttattataaaccaaaggcctaaaataaacagtttagtaaatagttattacattacaaggaaaaacatctgtggaaactgctttccatgtaattattcttgctattttacattagcgctcaacgtgaatttctttggcactaatgtttcacttgttctaaatcttcctccttgttgctattattaaaatcttaaaaaggtgccaaatcttaaatgaagaaaaaaaaatgattcactagaaattattcatatcacagtgagccactactaaacctggcaggggtgcagtattttcggtgaaattaacataaaatatacaactgcaaattatccaggaaatagctatgttctttacggcatgcttttacattgggaaaaaaaaatgttcttcttcatctcgcacaaagccgcaaacagctccattccggcaagttttaaagggaaagtaatagatttgtcaaaggagcacgggctttgaaaacagactaacaaatagctcaggggtggatcagccttaggtaattaccagagacaacgtcagccctggacagccggagtagatagagaaggcaagaaaaacaacagcccgcagcttccttccccctcgattccagagaatgtatttcctctcgaaggcctcagcccttactcctaaacacaagaaaaactgtaacaccatgtaaaatgcaaatcttgctgtaaatattttataaaattgttgcatacatcccaaaagctataggtcttaattgagagcaggcgatttttctagtcaatatatggaaatggaaaatgctaatttgtgtttttctacttatgaaaaaccctggagaacagcaagccacaaatgcactcactttaatattataaatataatttggctccctctctaccatccccacagccctggcttttatctccccgtggctgcaggagagagacagagaatcgctttcacagcatcagcccgggaaggtggccttgcatgctgtgcagaggagggggatgtcaggcacagggctgtgtgcttccccactcccacctcttcaccccctagggattggcaggcagggatggaatatggcagggccacacgccaggaagcacagcccagccattctgttccagcaaggggcagaagcaagaaggatgcctggggtttcggccacgtggctcctctctgccctgttgggtcggcttgggcttcgggctccatccaaccacctaagagctctctctgggcatcgagagatctctctgaaggtcagccctggagcagctgtgatgaacaggagcagctggcaagatggctggagcactccaagttgggagtgtctgtttccaaaccacaaaaagagtaacgccactgccaatgttccccaagagcctgctcctctggccaggggaagatcagcccacagcccaggcctcacaatgcacctcccagtgggaacctgggggaggagggtctcctacctagagctatcctatctactccagttgccactagccacatgtgactactgagcaactgaaatggggtgggtctaccctgagacgtgctgtcagtccaaaatacacaccatattgttaaggtttagtacgataaaagaatgttaaaaaagtctcattcataatttttaagttgattatatggtaccatcataatattttggatatattgggttaaacaaaaagtatactctttaatttcaccggtttccttttaatttttttttaaatgtggctagtagaaaatttgaaattgcacttgtggctcgaatcctatttcctttggacagcctgctgtagaggatgctccagtctgccgtgtgcaagcctgcctggtgtccatgcatgtcggtgccgttctcttaggtaccgtgtaaatgggaggcccccaacattatgattctagagctctgcagttctcagagtttgggattctgtgattccaacaatctgcaagtctacagctctaagagggcacaatactcagagattatattactattggttctctgcatttaacacagactttacaaataccattatgaagagggcaggaccacagccctggccttgttcattcctcagtcaaaaagggctggaatatttggtaatcacagctaccttccccgcatcctctcctaaacccaaacatagctcaaccctccctacggcagcctcctgggtgactcccaccctcccttactctcccctgcccacaatgcagaacaggtcctcatggggagagcttgtcaatcacacacaacctccttccctgggtagtatctgcttcctggaaactgttcctcaacttctcctcacatgtgtgtatttgaagaaaacagccagaaagaagacaggagtggtgagaaggacacatttagagttaggtagcctgactatacctccaggctgtgcaactttctagctgtgagagcttaggtgtgttactgaacctctccttgcctccatttcctcatctgtcacatgggaacaataactcctactttataaaactttgagggaaaactgcaataatgcacgtaaggtgcctggccacagcacacactgcataaacagtggctcttattccttttaccatcattatcatttttgtcattccagagctggcacttggagcatcattcctgggggcagaagcagtgaagggaaacaggtgtcaggccagagtgaaaacctgtgtagaggagaaagggggctgcctggagatttgtgggccctcgctgctgacagaccccagctggctggtgagcacgcgcactggggacaaaactgggtagggcattccactgtacaggaaactgagcaagggaggccatcacgccaaaaggcccaggcctggccctgcaatcctggctgtgcagagacacctgaaagtccaaggtaagagctgtctgctgaagaaactcactgcttcacttccacatgcttttggaaatatccagggaaaaactgaagtggtcgggggtgatgttaggactggatgcagatggtttataactactgcagcactgtaaatggttgcttctaaagggtctgaaagtattaggctgaaccacatgaaaatgtcattttggtaggttcaaaactggatgctcaacttactatctttaacacctgaaagtggggtgactattggctggaatgaaaggctacatggtttcgaagaaagccccagtttctgaactgtgagttggaggccacacttcacaccaggcaccccgggctcagcagaaatccctccctaactgtacacatgtgtgtgcacacacatagacacacacagacatgcacacaacatgcttgtctgcctttgaaatcgcttacaggttggaagtaaattaaaaaccaagaaagaagggagggaaaagacacagacccatctaggcttgtgcaatggcaaatttccatgttccaaagaaaaaggctaggttacttggcagcccttaaaactcaagggaaacctaccctgcacactcaccccactgcaatcagtatacaacaatctgcgcccaagtgaagctcattgatgtaaaaggctccagtccctcagtgttccctgggactgtgctgagcacttgaccatagattccttaatcccctcatttcacaaatgtataaaccaagactcagagaggttaaggaacctgcagaaggtcacacagcaagtgagtggcagagccggatcccaagaccccagagccaggattcatagacaacatggaacacagatgggcttagcagcactgtgaataacagcccaaatccaggtacaacccaagcacccagcaacagtaaaatgcacattttcccatattcacacagtgcaacaaacacacagcaatacaaaggaacacactgctgatacacacacaacacggatggatctcaccaactaaatgtagagccaaagaagccagacacaaggaccacaggatgcatggggcgattcaacagaaatgacactcagaaacaggcaaaactcatccaccgtggaagacgtcagaacagtgattgcctttggtaggggtacaggggtatcagctagaaggaagcctgaagaaaattaccggtgaggaggaagtgctcaatttgttgatgtgggtgctggttacacaggtgtacacacttgtaaaactgtatcacgcaataccataagatctgagcccttcactgtatgtaagttaagcctcaattaaaaggggcaagaggccgggcgtggtggctcactcctgtaatcccagcactttgggaggctgaggcacttgaggtcaggagtttgagaccagcctggccaacatggtgaaaccctgtctctaccaaaaatacaaaaatcagccagacatggtggtgcatgcctgtaatcccagctactcaggaggctgaggcagaagagcggcttgaacccaggaggtggatctcagctcagtgcagtgagctgagatcgcgccacagcactccagcctgggcgacagagcaagactctgtccctaaaaaataataaataaaaattaaaaaaataaaataaaagggggcagatcctcccaagttatggaggcagcaaggaccctcactcgggcagctctccccacaggatgcgatgaattcgtgcagccctgcaggaagacaccccaaagccaagccagcagaaacaagagtcccctaaccagcctcacaattctaaactcagggtcagatagacacaattctgggcaacttctcggtctcagtcttccatggcaaaaagtgacaggaagggcccccacagcaggggagatgaggcccagcagggaaccatgcgccatggcctcccctctctcgtggggagcaggaaggagccggccgacgtttattacccgccagcggcaagattgactgcagccctcctctgcccacactgcgccattagctcgtaatggccccgaaggctccctcggccacagacccaggccggagtgagtgctccggctccgacaccaaagatactaatgactaccacattgccgaaataaatcaccgtcgctcaggaggggctccggcccggccggcggcctccaaacttcatttcacgaatttccccttaacactcagctgccttactgagggggttctcgggtggatgcatcatcggagaatttctctgatatgatgtttataaagaaggagaaaaaagaaaaaatggggactattaatctctgcaactccacaggagtccacattggtgggaatttggaggttggaacaaaatccttgtctgagactggacaaggcattcaaggattcggaagggcccatgtgctgacgacggactaaaagggtctcctagagaacccggctccctctaggtagatgctccaaattggggacaatgtggcatggtggtgaggcacacgggttccacagccataccacgcgggttcccatcctggctctgacatccgctggctgtgtcaccttgggcaggtcacttcacctctgtattcctcaatttccccatctacaaatggagagaataggggtatccctttggggctgatgggagaattaagtgtttagaacagggcctggcatataagtgctatacactcatttgggatcaatattactgttgttattatcgtgttaaaactctgaaacttcccacaggaacggaacctggttaacattgtgaaatgctccttactccaattcagccctggtattgttgaagtgtggatcccagaaggggagtgacttgttcaaggtcacaaggcacatggtggggacaggctggagtccaggctgtggctcgttcacataaaaggcagccctctctgtaaacatgcaacgtcaatgacacaggggtctgcgctgcacagcaagtgagccagggagagctgcaagcttctctctgggctcagtcagcctgtggtccccccttggctttgggacctgcaggcggtgctcaggaacacagccgcagctggagagcatcctccctgcctgtcttcctagaggaagcaggagccagggcggaggaaacagatgggcagcctcaggcaggggcttgttcctcaagaccctgagtcctcctcttctccctccttgacacacaaccttcatgtctctaggtgatctggagtctttcctataaacctcagctttggctgtggagacttgttccagctctgacttaactctggtcccagcactgggtcttgcatacagttggtgctcaattattgtttgggtgtcattacatctctgagccataaagctatgccagcctaggctccccggcttcctgtcctggaccagagatgctctgttctgaatctgactccctggaagccccgaaataacagagaggggctagagtccagttcatcactgcctccgccaggaaggcctcctgacttcttcagcactccctgatggctgttctgacaaccagtcctccccaagctgctcatggcctaattgcccacaccctcagttttgctgccagcccctggaaggcagggtgtgaggaggccctcctcatcttttctgcactcgaagagtttcaccgtagaagatgtccacagccttgacagcccaggctgagggtgggggtgaaggtcaggaggggctgcacagaaccaggtcagctggcaggtcatgaaggtgtccatagaccagggcacactcagcgagtttcgggtggggggcagtttcagcagattcctccaggtagcctaatgtgggagcagaagtgtaaaacccggcagccccatccaagtgccttctgcccaggaaaacaagtgcctgggctccagccgcaggcccagggcacaggctgggtgtggaccaaattccttctcagcagccatgcgtttccagcatgcaggaattgctcctgccgattcaaaaccaggtcagagaaaaccggctcttgtttccggcaggggtgagtgttcctcccagggaagggctccgcaaaagtctccaaaccgagcacaagagacaagtgggaaccaagcctcattccctcggtggccccgcggctgccaaaattactgacaaactgacctacaaagagagtttctattttgtgagcaaaccccaaaggttaacagcggagctgccggcgggcgatcagcaccgaggagcggaagcttccccagcagcgcccgcgtggagccctggcacctcggtttcgcagagaaacgtgtccctgaaatgccaaggagaaagggaggatgggaggaggaggttccgaaacactggtgcgagaaaagggtctggatgggaggataccagcccatcaccaagcagcctctctgtcccaaagttctggatcactgtcactatctggggcctgctgcagtgatctctggcagggccgccagggaccacaatgtaaatggtgtcccctagagttgtgcagtagacaacctgcacaaccatatcctgcaggcctgtgtcctgtggggttcctgtcactcaaagaatcttgcctccacacagcactggcttcaaggacgtgtaatacatgcagtcacacaggttcctgaatttagaaaagcccagcatatggttttataccctactgtcactgtctagattttttttttcttcagacgaagtctcactcttgtccccccggctggagtgcagtggtgtgatctcagcttgctgcgacctccgcctcccgggttcaagtgattctcctgcctcagcctccagagtagctgggattacaggcgcccgccaccacgcccagctaatttttgtgtttttagtagagacgcggtttcaccatgttggccaggctggtctcgaactcctgatctcaggtgatccgcccacctcggcctcccaaagtcctgggattatgggtgtaagccaccatgcccggcctagaaattcttaataattttctgacatacagcccacattttcatttggcatcaggtcccacaaattattcagctgatctttcctccatgtctgagagcaccagagccatgcctgaataatttataccaaaagtaagaaaatagcctccctccttcctcatcctccaagcagtccccttgtggcttgccaggagcaggggtagggcttggagagccctggggacaggcaagggcacaaggatgccagaaatctccaaagccaagccctgatacagggagaagcttttgatagcaggaacccatttgagacgaaaggcccttgggtgttctcgtacgataccggtgtctgagctgcaagaacagcccctggttgtggcagtggatgagcaacagaaagcaggccagataatatgcacaagcaggcggcaaacagggtcaccatcagcaccccgctggcgggcacccgggcccctcaccactgtctctcaacccaggcctctcaaagcacccacggccactgacatttcatcacatctgaccagccacctgtgagagagtgccctcaccattggggtcacagagggctgaagactggccacagccaccctccaggacaggcctgacccacacctcccctagccctggtagtggcacagtggtccaggacagagctttccagtgaaaacttcaaaggacagaacagagcaaggcgtcacccaaccccatctagttggcccacgggcacctgccttgaacacgctgccacactgcagtttgagaaccagtgatctagtggcctcgtttctagtctccatcaatattaaatagttgcatcacctcagcagggttcctaaacctcactctatttctgtatccataaaaggggcatcctgggtttgtgcaagagctcagcttttttgagggatgcacaatcacggtcagtgcaatccctgctccctctgcccctgtcccaacttccagtctggccatctggtcatgcaacctgagatccttctcccatcctcaaggctcagaattttgcattgctctgcccctgtgtctgaccaccaaacaccaagaagcctgctgcatccaccccattcctgggctgccacgaccactgtccctactggtgtgatgaaagccggacactgtcccctccagaacccagactgtccacatcaccagatcctgggagggcagaatcagaatgcaaaggaacagttgaaagaaaaataaatcacaccccagaggaaagggggaaatgtattaccactttcaacttttgcctcggatgctgcctggcttaatgtattggcttccatgcccataacagcccactcttctcctcttgccaagggtattgagggttctagaaatagtcccggccctgggtctgggccactgggtcccaaagtcccagctcccaggttcccaccgagctccaggtctcaccaccagcagatgtagtatcgaccagaatttcccagacttccctggagatacaaatcctgggggtggaggatgcttgttggctacccagatttccaggcctcctcacacccaagttccatctcttctctcgttcattaaatacttattgaatgagatggaacttgggcgggtttgcatccatcccagcctctggccagctgtgcaacctcgggaaagtgtctgtccctctcaaagcctcagcttcctgaaaagtaaaatggaccacttagtcgtgaagcttccagctttttcttggcttcaacagagcagcaagccccttctagacactgctccaaacaaagagagaactccaactcagccttctaaaagagaaccaagcccatcccacctccttccattccccagaacagaccctcaggcccccttctgagcgacagcagacactccctcgggagaattaaaatactatttttcaataaatgaagccccggccctgcaccagccctggaagactgtgagctgggcgaggtggcttcctgcatgtgcctcacttattaagacattgccactctgaagagtggagtcattcccaaggcccccgttgtcactggcaggcagcggttgactgacaagtgtcagttgcagcttgctgagcagcagaggccaatagactgtgaaacaaggagcagatgtgctaatgacaaaactttccaaactgaaaacacaaggagcagattcccgggaaaggtgtttccccaacctctacctggtgatgggacgaatgagaaaaacactagccaaacacagagctcaaagtcatcaagacttcgtaatgagaatgcaacaggggctgagcagaaagagggaagggccgctgtcacagccgcgtgcacctgcagccagcgccattgtcatagcagctctgaggatgtaacaagaagcaagcaactgtcatcaaactgtaaacagagtgaaagctgcagaaggacatgtaggagtcactttcctatgggaaagtcccatcctttggagttagagcaaaataaagtcctctcttagacgctctcctgtgcagtaagaagaaacatctgtaatgcccaccgacagcagaaggggcctggcatgagggtatgtgactgggaagacacacgctggacctagagaagccagcttaagagcgaggaaatggtgtcatgccaagcccatggttagaattcagtaacacttgctgaggagtggagggacagaaagagtagaaaatagggtaaccagcaaagttgatatgcagaatgtttcaacaactggtgcaccagggtccccaccaacctgaattatcccagggggtgatgtggtagccctgatggactgggggttatcccctcaagtgctggggatgcccagggggctcaggtcccagagggagaacctgtggataggggtctcagggcagaaactatttgctaggtggttaggaagcacatgaatgttttatcaaacagtacagtggtactggtgcataccagctaaggtgtcctgacacaggtgccttggtgaacagtgatcacaggggccctgggatgggtgagaacacagcgaggaacattctaactatcttttcacttatatgttcctttaactgactgagtaatgctcctgccatctctgaaacaaggcctcccaagtctccgagcagagaagtggggaccatgcaagccgtgtgaaggccattggaaccagagcagagcccaccgggtgggggtctgcagggagaggaggtcaccaggagaaagaaatgagctgccccaggagcaggagacagagccagatgtctgaacccagattctgatcctgatgctgcagaaagaagccccaaaatgttttatggtgaaacgttaaatgttttggatttttttttttttttttgtaaaacagatcttgacagttgagagagtcagagtccttcattcacacaggtgactactgagttgttgttttgtttttcctttaaggaagcaggccttatgataaacccttcatgaaaaccccactcaggatagcattttttgtggtccttgcatagtgaaaggtgccttttgtggctcactgcagccctgcataacaggccacagaattcagagttcataaacataagaagattaactaagcccagcatggactgaggacctcaacttcagcatcttttaaggattcatgttatcagtagaaatgactacctttttcccaaagctatgggttctttactgtgtatgttgatgtttgatgggaatctaatcctaagccagattctgggggcagatcaccaaaactgaagaagctgggtttgtgtcacagagcttcttgatttcaatcagcccctgcagctttaaaagagcagcccacggaatcctcttcccaaagtgaaagggctggataatggggttgttttagtcatatgaaagtaaggatcattctgtatcttaataggcccataattaattcacacattcaactgttaagtccagaaatatgttcatgttgacaatttgcatttgatgcttcaaaaacaatctggcatgtttttatttgcctcgaaatctcaggaacatccacccctttccattatccatccaaatgctacaattccacaacagcttcctaaggccccacctgtgggaatgcggggagggggctcaagatgcccagtcaggagaagtggtgttagtgcgagagctgtcctcctttgaaggacaagaccaccatatggccagtggaatttccgtctgcccctcccaactcccatgacaacttttagccctaggcatcaatgactggagatcattctaccaccccatatcttcaacactggatcagtgattttcccctcaacccccaagcaccagttatgccccacctttgcccagctcctggtctacactatgagtgcacccatctgatatgtcaggtgggaccccaccccagcctgtctacctcatcagctcctaggaggataaaaccagagtgagaaggaccatcggagggaagaatataaaaagcaatgctggcacaggaacaagggatcgttagtatcaacgtttactgctaggcttgatttacaactgccaccaacaggcgagtcagaagaggaggggagggggaaggaggaggggcctgagctcaagccctcaaactcttagctccaatttccacaccctgagtcctacaagctagcacagaagttgctgtggaataaaacaatgtttatggaggttctcagttgcctgtgctgcttccagatcactcccacagatgtactattccctattcctctgtcgaagtacaactaaaaccctgaacattatatatgaaagaaacagaagaagattcagaaaggcagagagaagaagccagaccagccagggacccaaggagtgacaaagcggtgaggatcctgggttttctttttgcttcatatatcccagactaggacctgacaaaactggcaacccagaaacaccaacaaggattttgctttaagccttaaccaaaccccactctttctagccaaaggaccaggaaagatttttgcctggcaaaacagaaaacgtttagacaataacagctctgctccaggcaaaccccacagaagaaaactatgaccccaccaccatccactccagcaaaggctgaatggagatctgagactgccgtgctggcaaggcttatataatgaggcactcaccgcccgctcttcccatccctgttaatgtggcatcagagaaaccctagcagggagccaagacagtcatacttgctgggcagtaacaaggcctttccccatggtgtcagtagagaccacatggggagcctggactcccctcctacctaacagtaacaagtgccctaacccatcctcctggtatagtggagaccatgtggagagcagaaatgatgcattcctaccacgactgctcagagaggtatgagtggagacctagggaggaaacgagcctggaattctacccacacctggcagtagcaagatggcatctgcaccccttctgcactggagtggggtcaaaggaagccagctaaaacagagggtttaaataagatccacagtgtcattatgtaatacataaagatttcaatcaaaaatcatctatcctaccaagaaacaagatctcaaattcaatggcaaaaaagtcaatcaatatatgccaaaatcaaaatgacagagatgttggaattatctaatggggagtttaaaggaggcatcatagaattacgtcaataaacaattatgatcatccttgaaacaagtggaaaaaaaaagaagtccagcaaagacctagatagttttgacaaagaaataggagatacaaggaggcactaaatggaaattttagaaatggataaaggagaaaatcttaaaacccaatgaataggcctaacagcagaagagagaagagaaaaaaagaatcagtgaaataggagatagaataataaaaatcacccagagtttcaggggccagtgggactataacatttttgtgattcaagtcccagaaggagataaaaaaaaaagagggcaggattgaaaatgtactcaaaagagtgatggctgaaaaattcccaaatttggcaagagatgtagatgtattcgagaagctgagtgaaactcaaaaggaataaacacaaggaaatccacaccaagacaaatcatattccaactcctgaaaactccaggacaggaaaaaatcttgaaagcagctggagaaaaaatgacaccttatacacagtgaaaaaataattcaaatgacagcagatttctcattagaaaccatggaggcaagaaggaagtggcagagcatttttcaactgctgaataaaaaagaactgtcaatccagagttcttctacatccagtgaaaatgaccttcaagaatcaagggaaaattgagatactctcagataaaagaaaactaagagaatgcgtcaccagcagaatcaccctaaaaagaatggttaaaggaagttttctaaacagagaggaaatgattggaacattaggtagtaagaaagaacatggtaaggaaattttactgtagataccactaattccccttctcttcttgagttttctaaattatgtttgatgtctaatgtaaaatgttaacactgtctgatgtagtactaaatatatgcagaagaaatagttaagacagtcataagtagggaagagtaaagggacctacgggaggtaacttttctacatttcacttgaactggtaagattatgacaccagtagtctttgataagttatgtgtatataatataatacctacagtaatcatgataaaaagctgtatcaagaaatgaaaacactacagataaaccaaaataaaattcttaaaaatgttcaagtaagtcacagaaaggaaaaaagtaaaccacaaatgaaaaacagaaaataaaatataaaatggcagactgaagctctcacatatcattaacaacattaaatataaataacctaactatactaattaaaagatgaagattggcagactggaaggaaaatgactcacctatgtgctgtctacaaaaaactcacttaaaatataacaatactggcaggttgaaagtaaaagaatgtaaaaggatatatcttgcaaacattcattgaaagaaagcaaaaaggctatattaatattatataatgaaggcttcagaacaaaaaattagcaagaaagaaaagaacattaaacaatgataaaggggtcaatctaccaagaaaatcttaaatatgtatgcaccaaacaacagagctgcaaaatatgctaagcaaaagctaatagagctgacagaagaaatagacatatccacaattatagtaggaaacttcagaacctttctctcaatgactgataggacaactacgcagaaaatcagaaaagatacagaagaactcaaaatcattgaccaacaggatctaatagacatttatacaacactccacccaacaataacagaatgcacattttttcaaatgcgtagagaacaaataccaagacagaccatatcatgggtcataaaacaaatgtcaacatatttaaaataactgaaatcatacatagtgttttttcctatcacaatggaaccaaactagaaattaatagcagaaaggcaggaaagcctccaaacaatagaaactatacgacgtacctctaaataatcatggatcaaagaggaagctcatgggaattttttaatacactgaactgaacaaaaaaataaactacaacatgtcaaaattcgtgggacacagctaagtaaaggctaagagggaaatgtatagcaataaatgcttaataaagagaaaaagtctcaaatcattaattaagcttccacctcaaagacctagaaaaagatgaagataaacatagaacaagcagaatgcagaaaataataaggaaaagatcagaaaccctgaaacagaaaacagtaaaacaaaattgaaaatcaattaaacaaacaggtggtgttttaaaagattgataaaattgacaattcttttaagaaaactaacaaaaaaagagagaagacacagattaccaatatcaagaatgaaactgaggatatcactacagacactacagacatcaaaagaataataagggaataatactatgaaaaactctacatacataaatttgataaattagatgaaatgatctgatttctcaaaaaatacaaactaccagaatacacataataagaaatagatattttgaatagtcctattctattaaggaaatggaattcataatttaaaactccctgtaaagaaatccccagacccaggtgttttactggataaatctaacaaatgtttaaagaagaatcaacaccaattctacataacttcttttggaaaacagaagaggaaagggcacttcccagtttatttcagtaaattaatattgccctatattaaaacccggtcaaagacaggacaagaataaaacttcagaccaatatccctcataaacacagatacaaaaatccctgacgaagtattagcaaatagcagttagcaatatataaaaagaagtatacaccatgaccaaatgagatatatatatatcaaggatgcaaggcttactcaatatttgaaaactggtcaatataatccaccatattaacatacttaagaaaaagtgcatggtctcacaataggtacagtaaaaaaaaaaaaaaaagacaaaaacttcaggcatttgacaaaatccaacacccattcatggtaaaaaacaaacaaacaaacaaacaaaaaatgcttagatagaaggagaattcctcaacttgataaggagtatctacaaagaaaacctatagctgttattttacttaatcgtagaagactgaatgttgtctcccttaagatcagaaataaggcaaacatacccactctcacactactgttactcagcatagtgccagtaggtctagccagggcaataaggcaagaaaaggaaataaaaggcatacagatagttaagaaataaataaaactgtcccaatttacagatggcatgattgtctatgctgaaaatcccatagaatctacagaaaaattcctacaactaagttgagcaaagtcaagcaatacaaaaatgaacattcaaaaaccaactgtatttctatatactagcaataaacacatgaacactgaaattaaaaatgcaataccatttataattgctcaaaaaattaaaataattagatacatctaacaaaacctgtaccaaattaggatgttgaaaactttaaaaaaaaaaaaaaagatgaaagaaatcacaggtctaaataaatggagaaacataccatgttaatggattagaagactcaagacagtaaagatgtcatttctccccaaatcaatatacacatttaacatgattccagtcaaaattacagcaagaattttggtagatacagacaagattattctaagatatatatggaaaggcaaaaagagctagatagcaacaattttgaaaaagacaatcaataaagaaggaatcagtttattcaattccaaaacttattctatagctatagtaatcaagactatattgtatttggcagagggataggcacatacatcagtggaacccagaaacagacccacagaaatatgctcaactgatatttaacaaaggtgcaaaaacaattcaatggagaggctggacaatgtggctcatgcctgtaatcccagtgctttggaaagctgaagcaagaagattgcttgaagccaggagttcaacaccagatgggcaacatagtgagatccttctccacaaaaatttaaaaattagccagatgtggtggcctatgcctgtagtcctagctattttgttaggggggaagttggtgctgaggcaggaggattgcttgagcccaagagttcaaggcttcagtgagctatgatcatgctacaaacactccagcctggtcgacagagctagatcttgtctctaaaaacaaacaaagcaattcaatagaagaatgatagccttttcatcaaatgatacaggatcaactggacattcataggcaaaaataaaaacaaaaacaaaaaacttcaacctaagtcttatattgtatataaaaactaactcaaaatggaccatggcctaaaataaaactataaaactttcaggaaaaaaaaaataggagaaaatctttgcaccaaaggtataatccataaaggaaaaattgacaaatctaattaaacaaaattaaaaacttttattctgcaaaagctcctcttaagataaaatgacaagctccagactgggaaaaatatttgctgaccacatacctaacaaaggactagtacttagaatacataaagaactctcaaaactaaatggtaaaaaagcaaatgatccaattagacaatgggcaaaatttatgaaggaacatttcatcaaagaggaatggctggcaaataagcccatgaaaagatgttcaacatcattagccattaaggaaatgcaaattaaaagcacaatgagatatcacaatgcaactatcagattggctaaactaaacaaatagtgacagaacaaatgctggtgagaacgtagagaaatgtgatctttcctacattgctggtaggaatgtaaaatggcacagccactgtggaaaacagtctggcaatttcttaaaaagtcaaacatgcaagtactacagacctagcaattgcactcttgggaatttacccccaaaataacgaaaacttaaatataattccatttatataacagtcttgaaatgataaaattatagaaacagagaagagagtagtggtttccaaggattatgggtaggagggaagtgtctatggctataaaagggcaacgggagggattcttgtggcaatggaaatgttttgtagcttgactgtatcaatgtcaatatcctggatgtgatattgtactctagttttgcaagatgttactgttgggagaaactgggtaaagtgtacagaggacctctatgtgaatctgcatgtgaatatacaattatctcaaaataagaactttattgtctttaagctaaaaatgtttaaaggacaaataaaagcccaggaggggctttaaaagaagggggaatggatagggagcagtggctcacaacagtaatcccagcactttgggaggctctggcgggtgtatcacctgaggtcaggagttcaaggccagcctggccaacatggtgaaaccccatctctactaataaaacaaaaactggccaggtgtggtgacgcttgcctgtaatctcagttactcaggaggctgaggcaggagaatcacttgaacctgggaggcagaggttgcagtgaggcgagatcgtgccattgcactccagcctgggcaacaagaaagaaactccatctcacacacacacacacacacacacacacacacacacggggcaggggggtaatgagcaccagcattcttcccaggctaactggcttgaggcgtggagagggtgcagggttgccaggtaaaatacaggacggcaggcaaatgcaaatttcggacaagaaataatgttttagtagagtatgtcccatgcaaatgaatggagacatacttcgactaaaaatgtattggctgtttatttgtaattcaaacttacttagcctgtatttttagtgggtaaatctggacacctagaggggaaggatgggacaggagggttctggagcccccagggacagtgggctgaaaaaggcagggtggaaacagggagaagtaaaagagaatgagcaaagggatgccagaggaccagaaaggcacgcaggctaggcagtcccatggtgggggcagagggcagtcacaagctgggaggcctgaagtcccccagctgctggtgaaacaaccctgtgtggggcaatcaggcagaaaccagaggtctaaagagcagatgctggagtctcggtaacagggggcctggcagcctgaccaaggggctcctctaggcaccaggagcatcacccagttaagcccaggccaacccctgggcctctgtcgccatgacctggctccacccaaatggtctcgcctccctacagggaaaggacgtgctgagcagtgggttcaagtgttcaggtcggtgggcagccacgtgcttgaccaaaacaaaaaatgctttgatgagactttgctatcagcctgcaagtcagttccagggaggccgctgcatacgtttcattttcaccttgctcccacacacacccaggacccgcccttctcttctgtgtggtacccatcactattggacacaatcaggagctcttacttgttctcttagtgaacacctgtctgctcccaccagacactatgctctgggacaaaatggcaaagactgttctgcttgctgcaatattcatgcttactgcctggcacacagtaggtattcaagaaagaaaaataacttggaactgggggacattatgttaagtggaataagtcaggcacagaaagacaaatgtcccatgttctcactcatttgtaggagctaaaatttaaaacaactgaactcatggagatagagtgcagagtgatggtcagcagatgctaggaagggtagcagggagggaggggaagtggggatggttagtgggtacaaaaatatagttcgacagaatcagtaagatctagtatttgatagcacaacagggtgactacagtcaacaatcatttattgtacattttaaaataactaaaagagtataattggattgtttgtagcacaaagaaagaataaatgcttcaggtgatagataccccattttccctgatgtgattattatatattgcatgcctgtatcgaaagatctcatgtactccataaatatatacacctattatgtacccataaaaattaaaaattaaaaaaagaaaactgaatgaatgaaggaataaatgaaaaatcggcttgattggagctactccttctgggtctgtcctccaggcccagccccttggagtcttgacaaggcagagagagggggccattcttcttgcagaaagccctcaggagcatcctctgagctgataagcactgacatctggtatataggcttagcatggccggtttttcctctctaaactgggactctatcatcatcatcatctaataacactaatacaatattgatagatagaatttattcagaacttaacatgtgccaggcagtgtgctgggaccttttcatacattttaatttatttaatcctccaaacagtgccaaccagtaggtgtggtgagttgcactgtttgtgctgccccttcttgtggaaataaaagccctctttcttttcaataatacccttcctacttccactgctggggggcagacacccaggaagggcaggggtcaccagcctgaccagataaccagctccacctccctggccataacgattggctcatgggcagcttcaggacgctcctgaggccagtggaagaggccttccactttctccccgctgggccccaaggatccaaggccaggtctgaggctctgaagcccactgggtgctcaggacagaggggaccaagctctggggccactggccacaggacccttgttgtctgctgttattccagtaaggctcagccagaagcaggtatgagggaaattgcccatgcatcagctgctgccaagcagccaaatgacatcaaaggatgctcaacaaagtcagttcaacaatccaggccaccaagcccatgtgacatgacagcaagaagagaagaacatgcttatgagccggctcaagcaagatgatgccagggctccagtgccagcccctccaggaccagctccatcagcatctccctcacttccatccttcctcttcccctccctgctggatctctctcccgaacctagaaacacactttggtctctctctcttaaaaatgcaaatacttcctgttacctttggagccttccagctcccacttctctccctcctctcccagcctggaacccggaaagtccactgacactgctgcccacccccatctcctcctgaccccttccatctgatgccactgaccctgctcacacccaggacacaatggccacttgttgctgagccacacagaccctcttcagcctccctcccagtgcacttttcacactgcacccaattgatattcctggaaacactgctccttcagcaccaaccaccctacactcctcactctccaggctcctcccagatgttctcaccatctatgctgatgccgctggatcctcttccccagacagggccctgctggccctcagatctccatgggtatcttgtgcaaggccacattatcacaaacactcaagcccaccaaacgtgatgagccttcaggtgcaggggttaagggcgcaggccccgagtcacactggctgagttcaggtccctaccctgaaactagcaacattggacatgacacctcaactccccatggataaaaggaagtaatgacagcacgtctcacagggtgttgtgagggtgaagtgtgataacacctgcagatatggaaagaagggcctggtgctgagtaagcttcattagatggtactgactgatacggtttagctctgtgtccccacccaaatttcatctcgaattgtaatccccatgtgtggagggagagacctgtaatccccacgtgtcgagagaggaaggtgattggatcatggaggtggtttccccaatgctgttctcatgaatgagttctcacaagatctgatggtttcataaggtgctcttccccctttgctttcttctctctctctcctgccgccatgtaagacgtgcttgcttccccttccactatgattgtaagtttcctgaggcctccccagccctgcagaactgtgagtcaattaaacctttttcttttataaatcacccagtcttgggtagatccttacaacagtgtgagaatggactgctacatgaaccactgctagcatcattgtcttctctgccagtccctaagagctcttcctctggcatggtatcatctgccacctgtcacccaaaacctggtcacctgagacctttgagtcttcctaacttctccccctcccatgtccactcaataagcaaatcctgctggttatgtctcttaaatgtttctccagcccatatcctcctatccaacatcctcaccttctctcacctactctacctcatcccctttgctgtgatccacccacctcctgcctcaaagtttgttctgttgcagtactgaattgtgtacagtgtccctacatactacatggacctcttttctctataattggcttgtactagtttctttgcctggaattcccctcccaccttacttcttatactctgagaccctgattaggtgtaacctcttccaggaagttttcctggaatacccagattgggcaacatgcctgtcctctgagctcccttatcttagacttgtgacgttacattgaccttgcaggttatcatctcctgagctgggttagcggcccctcacagagcccaccgaggattttaatagtgtttactgaacatgaaggtatgaggttactactagaagaaacctcaatgacagaggccttcccccaaaacaaacaaacaaacacatacgcatacaaaaggaactcaagaaaatgagaaattttccactattttaaaattcagaactgatggattctccatagacctaaacagcttcctcgaatgaaccaacgggattcaaagtcagggaaaccaagtcctttgggctggttctctcagccaggaagactgttgagggggaagtgactatgccctagtttgggggtttggcaacgaaaaaaaaaagaataaaaaagaattggattatagtcttgctgtacaggcttgttattctgacagaacagttccagaacctgaaacatgatctctggagggagagggagacatttttatcacatattaaggttagacagatgttttgggtctggtgttacctgaatcaaaagcaccattgaagagcctgacacagcccggttcagcaacacgtgatcctggcagaaaggagacaggaacccctttttcttttcatgttcatgagattttcctctgtggttctatttgggttttttgtatctccctggagctggggcgagacactgacttccactccagactgtcctccttggaccagagactccttcccctccaaaatgctgcaggctgggccttcagcacggggccagggtccaaatggcagcttgaacagtgggccctggctctgcaaggtggtttgaaagtatctccagggatgtgcttcataaagacttgtaaggtagaaaaaccctctctctgtctgtctccctctttccctctctctcttctacacacacacacacacacacacacacacaccacacacacacaacacacacatacacacacatacacatacacacacagacacacacatacacatacacacacagacacatacacacacagacacaaaacacatgcctccctccaggttggccagggccagtcctgccacagtgacaggggagggctggggacaagaggacacacaaggacagaagctggcactggggacactttaagagcctgggcaggaggcaggaggggttgattttccaaacacccacttcctcccccatgtatttgcccctgacagcagagcccagcccttgaaggcacccagggaaagggccggcgtgagcatgaaaagcaggcctccggaatgactaatgccccaccgggacaggcctggctctggcctggctgcccgccagagagtccacagccactttccaaggacagcaagggcaagcgttcctgacaagattccctgaggaccatcccttcccagccctgaccctccccggggctcccccaaggggcccgtgaggccctgcgtgaggacgtccaggggcccagaggctgagtcactcccttggggccaacctgggtcatggcaagtttgttatctcaaggacaagttctcagaccccttatccagccatccccacccaaaacaaactaaaagtaaggcctctccagcaaatcggcttcctgggggtctccagactcaggccctgccccccagggtgaggtgccatgtgccccaggagggcagtgtacatacattatacatatatgttcaacacatgtgggcagacccactgctcctcccttcccagccgtgggggaccagcttcctctgggccaagccccccataagcctccctctctctccttcagcagcccccccggggagcccaaggcaggggcctcctgcagagcaatttcctggggcggcagaggtgggagtcatcctcccagagtcctcggagggggtgaaggggaggtggggaaagggcgactgggcagagctgggtcaacccggcaggaggccacagcacagagctctgggctgctccaagtttttcatgtgccttctgggggaggaagtgtcaaagccatttcaaaagctgggggagtcccagggaaggggcctcattctccatgcggaggggggatttcaaaggagaccctgctattgaaaggtttccaaagaccctcgcctttctatcagatccaaatcactcccctccaagcagcagccaggagaggggtgctgggaaaatgtttccaaggagacatgtccctgagtcatcataactcccagggtctccgggctgcagagccatgcagaggcccccgctataaaaaggccggtttaccgccccgcaggggagctctccagcagtccgggtcccaggggaggcctgcctcagacccccaagtgccctgagtttatgagaaggctgcagagctgaacagggccacttctacccaccaagtccccctggtgccactaagggggacttttacccccgtcagcggcagggcagccactctgggctcagaccatttagcaggagaagccatccactgggacactgggccccaaaagatttactgggattgcagagccagccccaaaccaggcctgcagtgtctgcctctcaccatttccccagcagccttcccaagccaccagggccagccagaatcacagcacaagccacatctaagttccatcaactcctcttctccccctgccctgttcactcaccccaggaccacaccaggtgggtcttcgttctcttcccaactggttccttctcaacaccgcagccagattcttcttcctaaggctcaggccaggatataccctgctctgaaaccttcaatggctccctagcgcttaagtccaaggtttaaactcaggtacccacagggaccaggctggagacttaactgagcaagaccatgatgcctgggaatgcatgccttgcctacatacaggaaactgctgctgctgctaagtcacgccaggtgggaatgatgattgcgggaatgtgaagcccttgctgccacctcttgtggtttttcaagagaagcctagtaaaccatagccaaggggcccccaaagttggaccctggcctacggggtgaaggacaaaccctaacccctccacttggtatcggaggtgctccatggctcaccccaaccccctccccattctcactccccacaatgcctcagtcttggccaagccaagcacctacagccccccagactcacctgctctgctcaccccccatcctgctataggcagtggctcatcaccctcgcagcctggcagaaacccattgttccagagcctcctcctgatgttcagccatctctccgaaggcaacgtcccccctcttcatccttcaatgcccagggggccctgttctgggagcacccacatcactgcactgcagttacctgcatgcccatcagccttcccctggagagggaaccctgaggtctctcccaccacaggccctggcaggggctccaaacacaatggagggaccctagctgtggttcagactctgcctccattactcaggctggaaggacttgggtaactcacgtaacctctctaagccccgggttcctcatctgtcagatggggaactagtgcccatgtaaagtgcctggcacatagaaaggctgagtcagtagcagctgttagcatccttattcaatgtgacctctttgctgcatgctatgtgcagtgtcttctatgggatgatctctgaagcagagaccatgtcccctgtactcccgtcacccacagagaccgctgcaactctcaacatgccataggtgctcagtcaaggtcctctggtagactgggttgatgaggctcggggagggcaggcaggtagggagtgcaggttagagcgagagggactgcccagccaccggaggtctggctcacccggggttccatgccgcagtgaactggaatctgcactcggggaccaaccaaccactccctgctgcctgctctccaggcctccaactcccacgttcctgggctccaggtcagctgacagcgctgcagggcaggaatgggcaaggggacctgtccagccccccagccaaggcgccttccctcagaagcccggcccacagctcatacacaggcccaaatgcccctcacaccctccttttgtgtttcccacaactctagttaagagcaacccccttgccttgcacttgaggacacatagcttccaggctctgcactaaaggcaaggtagaagagaggagggagggggcagaaacacctcagaaatcactgcagtccaattagccaggcttgcgcccttcatgcttacaaacaggaacgcgcattaacatctgctacaaaagcaaacatttttagatatcttcatcttcacctccctgacactccgtgaaaggactctcagcagccagtgactgacaggggagtgccccttcttatccttcagcagggggctttcagacggagaaattaagaagccaccaatctccctgtcaggccaagctcccacagcccccacctgctcttcctgggcccctcctccccactctccgccaggtgagccccaccacacacacgattgggagtcagtggctgcaggagactggctccaaggcactgggggtagaggctgtcagataggttgggggtcagggggactggccaatgctgtggctaggtagggaccaggggacccatacctgccctgagagcaccttcactaaagaagggcctttgcaatgcaaaccttaaacaaaaccttgatggctgtacaaatttggagcaaactccaactctcatacaccactggtgggggcgttaagtccatacaaccacttcagaaatgtatttgtcagcatttactaaaggtgaacatcatttaacctgtgactcagcaagtccatccaaatcctatattcccattttatatacatatttacacatataaagaatatagtatataacagtatataatgtattatatataaacgcaaaatataatatctatatattcctataatcacaataaaatcacatacatatgttcatcagtagatatgtacatggggccaggtatggtgactcatgcctgtaatcccagaaattcgggaggctgagatgggcagatcacttgaggtcaggagtttgagaccagcctggccaacatagtgaaaccctgtctctactaaaagtacaaaaaaattagccaggggagatgctgcatgcctgtagtaccagctgcctgggaggctgaggcaggagaatcacttgaacctgcgaggcggaggttgcagtgggcagagatcgtgccactgcactccagcctgggtgacagagtgagactctgtctcaaaaaaaaccaaaccaaaccaaaacaaaagaagacatgtccatgaatatgccagcactatttcagaatgggcccatcaagaatcaaacagataaagagtggttggcatgctcctgtgacagattattatacaccaatgagaggcatgatctctaactagaggcaataatgtgaaaagtgaaagatgtcaggtgcaaacgagtagaaactgtgattccatttccataaactagaaatcaggcaaaaccaacctatattattagacatcagcatcgtgatgacctgttggtggtaagggagggcctgaaggagcccaagagggaagcttctgaaatgctggaaatagtctgtttcttgatctgtgtgtgggttacacaagtgtgtttagttcatgaaaattcattaagcttctcacttatgagaagttttctaaatgtacgcagtaaagggttttgtaaaccagtactccgatggcatagctgttaagacaacaatgaaaagatgctagaagaagaaaaacagagatgaagtaaagaagtagttcaggccaggcgtggtggctcacgcctataatcccagcactttgggaggccaaggcgggtggatcacgaggtcaggagttcaagaccagcctgaccaagatggtgaaaaattagccaggcgcagtggcaggtgcctgtaatcccagctacttgggaggctgaggcaggaaaatcgcttgaacccgggtggcagaggttgcagtgagcaaagattgcaccactgcactccagcctgggtgacagagtgaggctctgtctaaaataaaaaattaacaaaaagatgaagttcaacccatggctgcaacttcactgctcagactagagtcttggagaaagtgatcacatgtccaacaaagacccagggtaccaggcttcttgaagctctcccaggccccagcccatcccaggccagccccttcccttagaacctccatgcctatcagaacatcagaacatccagctgtgccctctcctacaatgagggcacccctagctgccaaggagaccacatccacccatccaaggtagaggggacttcacagcttcccaggtctcttgtgccaagtgtgtgaactccatagaactttgcaagctgcccttctagagaggctgaattttccaaagtccaaaaccacttgaagaggaatgggaaaagtactgaaataactttgtaagcgttctgttttgacaatgtgcctgaggaattcaccatgttgagtagggaaatgtgagcagttaaatctattcaatgtcatgacacacaaaattgaagcataattgctcctgagtgcttgacaattggaaagcactttgtttcagaaacggagggaaatttatgctggaaaatggaagagattgtcaaaagtttgattataatgtgagtggagctgcgacaagaaggctcagatggagaaagggcccccattctgacattttcactcccatgtgcaatgtctcagaaacagcagcagtgactctgtcctttggcctaaaagccagtaaaatgatgattggaaccgcaaatttaaaaccccaaagagtagctccagcatggctgggaggaaatgctctcttaccaatcatgtggttggcaacgtggatttggatctctctctcgttctcgaaggtcatctggcacttgatgcactggtatgtctttttctgtttggaaaccaaaaataaaagatttagagaggcaggaggtaggaaaaaggagaaagcaaaagttcctagggggcctgggtcaagactttccagaatggttccagtcccctcctaggtctccccaggccattctcttcccaccttcctctaaatccagctctaccagactgaggaaggggcatgaagctacattccaagggagctgcttctctgctagatctgggaaaactgccatctcaaggtgaagctttaagggagctgaggggaggcctccttgcttagaagggcaaatccatctacccatgcccccatccatccaaacatccacccatccatcctccatctacccatccacccatctacatacacaatcacccatctacccattcatccatttacatacacacccatccatccactcattcatctatccatctaccatccatcctccatctacccatccatccatatacccatccatccacctacatacacacccaccaatagacccatccatccatcctccatctacccatccatccatatacccatccatccatctacatatacacccaccaatagacccatccatccatcctccatctacccatccatccatctacataatacccacccatcctccatctacccatccattcatctacatacacacccaccaatagacccatccatccatcctccatctacccatccatccatatacccatccatcctccatctacccatccatccatatacccatccatccatctacatatacacccaccaatagacccatccatccatcctccatctacccatccatccatctacataatacccacccatcctccatctacccatccattcatctacatacacacccacctatccacccatccatccatcctccatctacccatcaatccattttccatctacccatccatccatctactccacccatccatccatcctccatctacccatccatccatctacatacatacccacccatccatcctccatctacccatccatccatctacatacatacccacccatccatcctccatctacccatccatccatctacatacatacccacccatccatccatcctccatctacctatccatccatatactccacccatccatccatcctccatctacccatccatccatctacatatatacccacccatccatcctccatctacccattcatctgtctatatacatacccacccatccacccatcaatccatcctccatctacccatccatccatctattccacccatccatccatcctccatctacccatccatttatctatactcactcacccatccacccatactccatctacccgtccgtctccccacccatacatctacacacacacatacccatatacccattcatccatcctccatctacccatccatccatccatccatccatcttctatctacccgcccatccatctacataaacacccacccacccatccacccatctacatacattcccacccatctacccagtcatccatttacatacacacccatccatccacccattcatccatccatccaaccatccatcctccatctacccatccatccatatatccatccacccatctacatacacacccaccaatagacccatccatccatcctccatctacccatccatccatctactccacccatccatccatcctccatctacctatccatccatctacatacatacccacccatccatcttccatctacccatccattcatctatatacatacccacccatccacctatccatccaccctccatctacccatccatccatctactccaaccatccatccatcgtccatctacccatccatccatctacatacatacccacccatccacccatccatccatccttcatctacccacccatttatctacatactcacacacccatccacccatactccatctacccatccatctccctatccacacatctacacacacacatacccatctacccattcatccatcttccatctacccacgcatccatcctctatctacccacccatccatctacatacacatccacccatctacccattcatccacacacacatccacccatccacgcatacacccacccatccatccatctattcacccatcagtctatccatccatccacctacctattgtctgtctacccattcgtccatctacacacatatccatccatccatctatccatccatccatccatccatccatccatctatctatctatttttctacctatccaataaccttctcatccatttacttaccctaataaccatgtggctgagcaggggacactgttcctgccaactctggtgttcaagggtggctaaggaactcctcatctgccctaagcacaaatgaccccaagagttcctacagctggtttccacacacaggggctagtaccagctgcctgtgggagctgagggcagaaaaactgagatgagaagcttcaaagcttcttgaagagttgttccaaagagtgaacctcactcacacaactaatcccagatggttctgaaacaccccagggacagaggtggtgttgcccatctgagggaaggactgtggctgtggggttttttgaagaaagaggggtggtattggaatcacaatatccaagttttttgaagaccactttggttcctgggatgagagggcttctcttacttctggaaaagggagcaggacttcacacttcttggccaaggtcccaggcccaaccctcaactatgcagccagatgaaccaccaggtagcttaaccatctcagctcctacttccctctttatcattctgaaatgttatgatgagctcttgcatggtgcacacttttctttccttttacttttaacctacctgtgtctttatatttatagtccaggccctgtagatagctttcaattgagtcttgcttttttctttgcatctaatctgacaatctctaccttttgattgaaatttcaactccatttatacttagtgtaattgtcaatatggttgattttaaatcctaccatcttttgaattaatttctattttatcctacctgttctctgttcctatttccctctttccacccacacccacagttccctaagtaactacaggcctttgcctgtgctggttcctctatgtgcaacaccccctccatccttgactcaattcaaatgtcatctcttctgagaagacttctcttttcaccccagaatgggtccaggaccccctccacatccctgaacttatgctaaaggaccctgggtaattaatacattgttgtgtcagggtggattggttcatctgctcccctcttgcaccatgagcacccagagagccaggaatgtgttttgtctacctttgaggcagcacatgaagtgcttaacaagcatttgctgaacacataaagttgcagaataacatatgcagaggagtctattcaggcagaggtgacaaagagaaccaaagatgacttcagtgtcctggacccacaccaccctagcgcaggccttacctagagtcagtgcataataattatttaacttttattacgattattattggcgctaagaaaatgctgcttgaacaaatgaatgaatgaagaaacaactggagaagctgaagctggatgcgtcaggctccaggacctgctctgacaaaaccaggggcctttcccacagtgtttcagaagacctgggggattcgctgtgtcctgagtacaggccacagcctggggcccagacacaggcactctgcatggaaaggccctgggaagagctaggtaagtcgggggcagggtggagagaaagacagggctggggagtccagccttgccacagacaaaggaagacgtctaggccacaaggagactacagggcctgaggtcttctcaggagatgcagcccagagtacacatctcaggtcaactccagggccatggtcgtggagatgaaccacctcgggtgtctccagcatcaaaaccatcccttctgtctcacatgtgcccccacctactctgcttggcaaagtgcaagagcctttggtggttgaatgaatgaacgaatgaatggaatgagtgaattaatgaatgaagcacatcccaggaagggaagcttcatcacaaggaagcccatgggaggcctgctggatgaggaccgcccaggcctataggtgggtgggtgggaggatggggttggtaccaaccagcagcaatggctgcgggcagatgaccacgtcccccctccaaggatggcgatttgcttgggtgcaagtctctagaggctgcagccatggctggtccagaggcatgcagggaacagtccatgatcacagtgacttggttgatcttctcaggggcaggtgaataaagggagctcactgtgcttggaaaatacatccccaggggcttgggcaggaaaacaggctgccctcaaatgcctctctgccaccccttggtaataggaagaacactgcccaataactgagcccctcctggtggggcactgggcttcatagggttcagagggttcccaagggaagggccgggagaagggctgacccctcacatacacacaagacacacacacagatgtgcaagcacacgtatgcattcacatgctcactttcaccccaactcaccagcaacacacaagaccttcacagacacacccgcaacccctacacacagcaacctgtaacacagatacatatgtgcaacccccagagaagcagggccatccacatgggtgaacaaggccacacagatgggcatgttcacactcatccagagaccctgccttcagctcactcaccacaaccccagtacacacaccggtactcccaaatacgcccacagacatgcatgcagcttctgacacaagtatacacacagacccatccccacacgtaccacacaccctcatgtacacacatgtagactcataagtgctcacatgtgcactcacacataggcacatacacacacaggctcaccagcccccaaaccctccaagcatggctggactccagtcctcaccccaacatctattcctagtctatccccactctcaacccccctggagaccccctcctcctgcagcttcagcccccactaggagatataattacagaaagacagaacttggcactcaaagcacctcccctgccataagccccttccctggggcccagcccaggagaactagagctgagttccagggcctgtggccagggctgcctcccccaacacagccctgagcaactgcagaggggggccccgggcaggaagaaaacacacttgagaatggcaaagacaggagagggagggcagggaagaaatggccaggcccttcaagacaggaaggagagaaggaaaagccagccagagctgttatatttccatgatcgtgagcactgccaatgttcactgagcacttgccatgtgtgggcagcatttatgctaaatactcacaaaccctctgcaagctccaccctagggatggggtaagtggagtttcaagaggctgcatcacttggtcagagcctcttgctggtgagtaggagaactggaattcgatgcccactgtctgagctgccattctcagctccatgtcccagatctcctgccaggcctggtctaggtgacagaaagctagtgggatctggataggccctctaaccttgatatctgtttacttggctgtaaaatgggtatgagaacacctggcctgtcccacctagcagagaaaggcaccgtggggatctgcaggatcaatggatggccagggtctgcccgtgctggtctcgagttggggtgatgttgtcattacccataaacagagggggaggtggaacttcaatgcttcatgctccagccgacagcagcctcagccccacaggaacccagtcctctgagagctggttgctatggatacactcccgagggtcccagcctgccagcccccaagcccctgtgaaacccccagagtctgttcttacatgagtgggtcctcagggagggaaggggtgggctaactgacatctgggcccctgtccccaggtgtgcccacacagggggcaaggccccagagaatgccgccttgcctggggaggtacctgggctttgtttctgcaatggcccatctccccaggcctccaggcaggcagagccatgattttcagctcatccctgctcacacaaggcccaaaggcagggagaggaaggcctgggggcccccaggaaacacggtccccttgagtttcagtccctgcacagccgcgcacagctgtgcatccttgggtatatggcatcacctttctgagctggagcccctctttaccaaaacacaggccacagcaaggttcctggattgttgctacagagatgacctaaaagttggtgcccagcagagcaccactcacatagtaggggctttcacaaagtggtgcttgatgccggatgcagagcactccagggaggctcacacagcccaaggctttggaggctctagaaacagctccctggccatcagaaaacccagcaccatggtgggcagtgccagaaagggaggggtgatctgggttgaggggcacccaggagaagcgggcacagtgacccagcccagctgcactgccccacagcctgagcacagctgtgaccacccgggaccccaccccagctggcctttcccttcctgcagccaggatgtggtccagagctgctgggtggactgttggtcaagatcaggggctgtggtgcagatgctgcctgcctgggttcaagtctcctctcagctctcgaaagctgggggcttgaggcaagcaacctcattgtggtatgcctcagtttcctcatttacaacatgaaatattgtaaggattaaatagaaagtgcttggcaagtccttactcctcaatgagtgtggattgccattgtaaaagggaaaaatatcagcgacatttactatgtgcttggcacttaatttacacatttaatcctcagagcaaaacgctaaggtcagcatgagaaatagtcacaatggttcacaaatgatggggaacaggcagtgaccaatcagagcagataatggttaaaaaaccagagaggccccccagtttctccctagatgcagagatgtcagcccaggagagactctattactattccattactatcactattcattaccactgccactacctctggcttcgtagtggaacacagaggcccagagaggtcaaattaccgctgggtcctgggagaaggagattttaacccaggccacctgactccaaggccaaaacattccctgagagcacctatgcccccctagaaaggctgagggggacagagcggggcagcagaaaccagtgcccatgctcagcccctggagggggtcctcctggggccctgtttagaaccctggctcagacaaagggtcctgagagggtggggtactgctatagcccctaaaaggagctctccactccagacaggactttgaggagagactccaggccccagccagacatgcagctctgtttctttttcttcctttctttctttctttttttttttgagatggagtcttcctctgtcacccaggctagaatgcagtggtgtgatcttggctcactgcaacctctgcctcgtgggttcaagcaattctcctgcctcagcctcgtgagtatctgggactacaggtgtatgccactatgcccacctaaatttttgtatttttagtagagacggggtttcaccgtgttggccaggatggtctcaatctcctgacctcgtcatccacctgcctcagcctcccaaagtgctgggattacaggcgtgagccaccacacctggcttttttttttttttttttttaaggaacagggtcccactctgccacccaggctggaatgcaatggtgtgatcatagctaactgcagccttgatcttccaaactcaaaaagtgctgggactataggtgtcagccacagcacccggcctcgctattttcattcaagttgtcctctcttcaggaagatatccacggacgggtcccctggccctcttggctcccgtgggcctgtgtgtaacaccagaagtcaaggtcagcaggcactgaggccccttccgctgtggggtcctccctttactctctctggccctcttctctccccctctgccctcctcaccccctcaaaatcacagggtcccaggaaaaacaccctcagcaaacacccctgtgtcccagccggtgcctatggcagatggcccttccccaaatcctgcctccctgccaatggtgccagcagcggtccttgagggaaatatactcctgagatccgcctggcacctccttggtctggaaacagacaacacagactcaatgggaaccccacacctgtgctgtctgacacccaagggccacacagactccaggcccaccattggttgcccctcagcccctgtacccaaggcctgtgtgggcccatccatagcctagacttctccccagctcattgaaagccacttatcatgggcctgtggctccctctggtccacaagtcccaagtcagggtccatttctggttctccttggctcccaggcacctccaaacataatgggtgctttgatgaacagggaaaatttgatgaacgaatcaatcagtcattaacaataacagcaattgaaaccacatcaaagggccttccacataccagcaactgcactaactgaaatgatgccactggtgataagagtaccagctggtgatgacagccagcaccactgagccatgagtgctgggctctcggccccttgtgtgtgtgtgatctctatgaactgtcaaaagaatcctggatctaaggcccagagaagtcagtgacttgcctaaggagacccaataagcaaatgagtatgtcataccccagctcaacaacaaagacacaagccaccacccatggtgccctcactgtgcatcagccactgtgccaggcacattacctgtatgatgtcctcggcctcttacaacaattctctgaggttgggacaattattattcccattttatacattagcatttgacaaatgagacccagagagataaataacatgagcccatcacatggctggaaaggcaatggcagtgctgaggttcaaactcaaggagtctacagcacagcagttctgttttgccactgcgcgatagcgccgcttcttggaaacacggcactcagggtacgtggctcctgtggggaccagaggagccccaaggagaggagcagggagcaggatgaggtggactgcacttacccggggcactggcgatgtctgggtgcctttccggggcccactggtctccggcgtgaggtcacggtggtccacctgcatgtggctctccaggtcttcggcactctcaaacttgacactgcactcggggcaacggaggccggcacagggccggtcggcgggctcgggcggggccaggccacccacctgtccgttggcgctgcgggccatgcagccggcgcagaggccgtagggcagcccattgacgtcaagcttcaccaggtcctgcttgctgcggaactccttgaggcacagggcgcacttgtagagcttctgcagcccctggccattgggggaggacgccgctgagctgcccgccagcttctgcatgtggaaggtgccatggatcttgagctcaagcgtggaagtgactgtctgcatgcagaccacacagcggaagcccgtgagtgagttgcgcaggtcagggtgcatctggcagtgctcaataaactcctcctcgctctgcaggggcatcttgcagatgcgacaggtgcccgtgtccaggctcttgctgtgggtcaccttgtgttcggtgagcgtcagcagcgaagggaagcgctcaccacagatgggacacatgtagtgcttggcagggccccggtgcgtctgcaggtgctcccgtagcccgttctccgagaagaaagtccgtgaacaaacgttgcacttgtgactgcccttgataaactcagccttcttgcgtgagccatcatcctcgcccggccggatattgtggtcccgcagccggtgattctgcagcagcacctccatggtgtaggccgccccacagatgtcacagccgtacatgggctccgacgcgtccacgtcatcctcgctggcctcatggctgttaggtgcctcagggttcttaagcagcatgccctgcaggtcagcaggctcagctttcttggtggccattgggggtaccccattggccgtgccgttctcggtcgcagcatcaaacacacagtgcttctcccgcaggtgcttctccagcaggatgatggcgtggaaggccttgctgcagaacttacagttatacttcttgctgtgtgtggtgatgtggcactgcagctccacctcggtgctgaaggtctccccacagaagatgcacttgtgagccttggccgggttgcccaggtggctgtgtttgacgtgcacctgcaggtcagcctccttgcggaagtcccagttgcaggccgtgcagcggtacatcttcttctcattgctgtgcttcaccgccaggtgcacctggatggacaccttggagtcgaagacctcctgacacagggtgcagtggtacaacacaaaggtgtgcatgtccagcaggtgcttctgcaggtcatccaccgaggaaaattgcttgtcgcagctctcgcacacatagtgggtcgacgtggtcatgtaatgcactgtcaggtgctgcaggagggactcctgggagtcaaagtcctctttgcactgggggcacgcttgcttccgcagcagcagctccaggtgcagcttcaggtgggtctggaagctctcaaagttggagaacttgaggtcgcattgattgcaaggatactccccattggagatggagttggcgcttgctgagagccgctgccgcttcggggaagacacctccacatcggacgagactgggctctgctcggccttggacttcttgctgtgggccagtggaatgttcttgtggttctccttgatgtgcttggtgagtttcaggatggagccaaagatgggggagttggtgcagtaggggcaggaatagacctccatgaaggactgcgtgggctgcaccaccggagactctagtttggcactgcccacactgcagtgggcctgctggatgtgctcggtgagggaggactcagtaaggaaacccatggagcactggttgcagaagaaagcattattaccgtcagaggggttggcgttggggccgcagtgggagacgcggatgtgctcctgcaggctattgatgtcggcgaacatctcggggcagtagttgcagtggaaggcagagatgttgccaaactgcatcacagggtaggcatggttcttgtgcagcttgcgaacgtgctcgttgaggttgtagagggtgggcatggagtccaggcagatctgacatgtgtggctctgctggggcttgtccgcgtggatggtcttcaggtggatctccagcacggccaggctgttaaagtcccgcttggaacaataggggcagctatagaccaccttggtccagccctgcccgtcatcccgcatcttcttctgcccccgcagcggcttcaaggtggagtccggggtggagccacgctccacagaggcgctggagtcgggtgtggcgctgctcatggaggccacgctgcccagtacagggtcgggactgacactgtggttgctggagtcgggctgccggtggctgtccaggtggcagtagacaccttccactgaggagaactgctcagggcacatggggcacttgtgtttctggttggcgtgggcttggtggatatgggcgagcagtgtgttctcgtcgacgaagacctcagggcagtgaatgcactgcaggtccgccttctcggacagctgcgggtggcgggtgagcacgtgcttctccagctcctccgtctggctgaaggtgtcctcgcagtagtcgcacatgaagtcgtccttcttggcttccttctccgacttggccagatgctccttgttctttttgtgggcctgcatgtggctctgcagcgagctggtggaggagaagccgcgcttgcacacagtgcacttgaagggcttgctggagctgtgggtcttcaggtggatcttgaggtggtcgctgcgggagaaggctgcctcgcactcgtggcagtgatacttcttgtcgcccgtatgcagcttgatgtgccggtcacggctcctcttgtgcttgaagaggcggctgcagtaggtgcacttgaacggcagcttgtcgctgtggatctgctcgtgcctcttcaagtagctcaagcggatgaaggacttgtcgcagaactggcaagggtatggcaggcccgtgcccccttcctcctcgccgaggccgaggtcacaaccatctccgatcatctgcgtgggtgacgcaacatccttgctggagggagacgaggccacccaggagagttgtgggtcgtcatcaccatctgcaagagaaggcagagaggatattagaggcaattcccagggctgccgagaaacaaggacagagccagcttctcgacagcacgcgggctgaggctgtgcagctggccaacggctgcagggggctgtggggaggggcaggggccggaagcaagtggacaccagggccttcctgtctgcagagggcacgccagaggggcggcagataatgaagggggagcgccttttcccttcacaacacttgcctggacctggcaggacatgataccccccatcagaggggaggctctcggccactttcctgatagggaaaggaggggcagcctggacaaagtcactggaaacgaactcacagaccaccagtcccataggccaaaaggaagacaagtcctgtcacttgatccacacctgggagtcaactcccctcaaatccctaatcctggagggaaggaaatcccactggtccttatgaacacaggcaaaattttgcaacaacaaaaatgcccttatcagattggccatagaatgcaccattctctgggtatgggtggactgatggagctggaagctgctgcttcaggtggtagacaagacataggaggtgtgaaatcacagggcaagagacagcagacttcagtgctcaggtgggaagggaacctagggcactgaagaggcatctgtgggtttcctggcccaggccatcctgagacccttgttttctttgttcccactgcacccctggatttgccccaaccccacccaggatcaagacagatggagagatggtgacagtgattggaggatgaatgaggacatggaaggccacagagctcagacccaggcggacccttaaccccactgcaaaggcaaggaagagacaatccttgtacagactccagccagtcccaccctccctggggacagcccccacaacccccctcgtttgctggcccggctagcctcagaggaaaactaaacaaacctaagggtaggccgtttctgggaaaacaaaggcacacaggacacagtgaataaagctagagacattccccggcgggggccgagcagagccagcccgggcagggagtgagttccaaggctcaagtttctcttcggctggatttaaaacttaataatgaatgaaacagaccgcaggctgctgcgggcaggggagagacaaacaaaagctcagattcggctccgctgaccttgctcttgtaaccccgaggaaataaaccactgcccccgcctctccagccgccagccagcctggctgagtcttcagaagagcctcacagacgtaacccagacgtaaccttggcccagaggcagcccagaccttcaggaagggatggggcaggcgcaccatgctcccagcacgggtgaacactggcacacagatgcgcatacacacgcctacctacatacacacacaacacccaccatcacacacattcattcacaccatcactcccacacactcacactatcactcacaaacttaaatatacatgcacacgctcatgtacacacattcacctgcagacacacacacacacacatcacagacctgtggtttccctacaaggctctccacacaagctgcctctgctgtcccaggccgatcctaagacttaaagagagaacaaaggctgattggggggtcttgaggggtccctcacagctggggctgagcctggtcctaggccccgcccccaccccctggcccccgcagcgctgattgtgtgaagatccacctgacccccctggcaccattggcacagctcaaccgggatgcatgcggctctccgaagctcgcagttctccaaagctcccgactgcaaggcttccggcagccaacccacctctgaagcccagctccccagcccagctcaaggggcctcctggaacaccctcccagagcaccagcaccttctcccccgggggcctcacatgacgggctcggcagacgggaaggatgcagcagtcgtggccagctccccagatgagatgcagtgggaggcgccccagcccctgcctgccaattcccagctcttgccagctgggctctctggggcacagacaaaagggaccccagggaggagatggctggggccaggggacctactcggcccccgctccaggccaggctggactggcttcttattattttgatgtcttcactcagactcactcaaactgccactgagcccttcctgtgtgcccagcactcagtgctaagtgctttctcacaactgcaaatgagtggccaggtccactcccactggacagacgaggaaactgaggcacggcctcagagacttgctctgggaaatgacagtgccagagactgatgccaggactgtccacattcaggccccttgatcgtgatgtgggcctggaccagcttctgggggccaaacagtcaaataagaccactcctgcgtgggtaagaaggggagaggcccacgtgtaaagcctccagggtcctcaggacttgatctccttggagcctgccttgtgaagagggctggggctggcccatgatttgcatttctgggaggggctcatcagggttcagagagacacaggaactggctggaacccacccagcaactgatgtgtggagaagtctcaacaactgggcaggtgaaaccactatcactcttgtccctaggacaagcctgaacagatatttctgccagggttcatttgctcctaaacctttcacaccacctgaagaccagaagacactcactcagagccagagccctcccagctcctctatgaattcatccatgccctgaacattcctcttaaccactcactttacgcatctgaaaaaagggaatcactgggaggagtggatgagaaaaactaatgggagaaagcactattatgccactgacatgagatgtccagaataaggcgcatctgagacagaaggcaggttagcagctgtccgaggctggagatgggagcagggactggctgcacaggtgacagggatccttctgacatgagggaaatggtctaaaactagactgtgggtgaagactgcacagctctgtaaacttaccaaagactggctgagttgctcacttcaaacaagtgaattttatggtatgcaaattatacttcaataaagttgttaaacaaaagcactattttgccaataataagaattagtactaattagtgccacaagtgctaacaatattaacagctccatttattgagaatgtcccacgtgccagcactgtgctaagtatgtctattatcgcaattaatttctattcatcctcacaacaaccatatctggctgtctgcagtaacattcccatttctgagatgaggaagtggggttcagggaggtgaggaactggcccccagtaccaagccagatgccccatttagtgtctggccaaacttcatcctgtaggagtacagaacctggtcccgaggccccacatcagtcattcacccagtaggctttgaaaaggagaatcttaacctgcccggcaccagagtacccaaggttcattgcaggctggctgcttggctttatttttctgcaaacaagttttgaaactaaagcaaagcgtattattctgggagcaacaagctgagccactgctgagattataatcatctgaattgaaatgaaaataaggctccttaaactgaaaaggcccaatcagggaaaatgggcatgttgacatataaagtcccaaactcagattgccctgtttaaagtcttttattcaaagaacattcaacctcgcctgctgccatcccaccccctccaaatgcattttgctttggggggacttagctcagtgctctagaaacaggctagagagataagctagggccaaagctcgggatgtatctacaggggcgtcagcagagaaagcggttctcttttctttttttttttttttttttttttggcaggggcaggaggggaaggagtctcgccctgtggcccaggccagagtgcagtggtgtgatctcggctcactgcaacctctgcctcccaggttcaagcaattctccttcctcatcctctcatgtagctgggattacaggcacatgtcaccatgcccggctaatttttgtatttttagtagagacagggtttcaccatgttggccaggctggtctcgaactcctgacctcaagtgatccacccgcctcagcctcccaaagtgctgggattacaggtgtgagtcactgcgcctggcccaaggttctcctctcttatagcaatgacactttcctcatgctggatgctggacaccacacacacacctgcaactgtggccaaggcaatcccaaagtcccctccaacatgaacattccagaattcaggaagaaggtgggttcaaggaaagtcctgttcagtcgctacatttttattttcaagtaaatacttgcatcgattttgctgtgtgccaggcattcttctaagagttaatgtgtactcactcattcaatcctctcaataggctaatgagttagggactgttataatttccatttacagatgagaaaaccagggcacagagcgactgagtgacttgcccagtgccacacagccagcaggcagcagagtcaggatgtgaacccccccttagtcctgttcagtcagtgttttcacccacaaggcttcactaccccccaccccccactttgggaggagaagcatgagaaaatcaagtgggaagtacaatgactaatgacagacccatgcttcccctgccccccagagtaaatgcaatcaaagaactataacaaaaatgagttaaaaaaacacacacacacttgcaaaatggagattaaagtcatttaaaaatgactaatcctgcaaaaaggccaaataggaaatgggttatatgaggcttttgctgtctgctgcaggaagagaaagaaaacaagcataaaagaggagagaatttttgataaaaattcaattaagttgaaaaaagaacattaactgggcttcagaacacgtcagcagcagaaagagccaggtgattcccaagctcatgtggtcacacttggtgaccagcatggagcaggacatgaattcagcaggctgatgctacagtgtgtaaaactgcctcggacacacctcatctaggctgagcagtgcaagtggccgcccagaatggctgggagccacagctcacggctcctctgtcacagagaatcaaggtcagagatgctggagaaggtgctcgggccaaggcaggagagtgactggcccacagactcacaggagtgggccgaaagggaaccttcctgcagtggggggcacacatggaagaggaagtgaactcctgccatcgaagctatgcaagaggccctaaaaagaacactagggggactctctgcattgagtttggggggaagatagctgagcccaggaagttccaggttactaggacattcctgagctgggcagttccatctgtgtgaataaaaatgaccatccagccgggcatggtggctcatgcctgtaatccctgaacattgggtggctgaggtgggaggatcgtttgaggtcaggagtttgagaccagtctgagcaatatagcaagaccctgtctcttaaaaaaaaaaaaaagaacaaaatttacacaggcatggtgatgtgtatttgcaaccccagccacttgggaggccgaggcaggaggatcacctgagcccatgagtttgaggccgcagtgagctatgatcatgccactctagcctgggtaacaagagtaaaactctgactcaaaaaaaaaaaaaaaaaaaaaaaaaaaaaaaaaaaaaaaccgtgagcctacagagggaacaagagctcatccagccattggaataaggtttccatcccagtcctcagggcctcttgtgcccaggactgtgctgaatactgcagggtcgcctgggtgcatcccaccttggtcctgccccaaggacattccagaccatgcaaaggagaggccaagtagagcaagaaaggcaccagtgggagtcatgctggggcaacgggcagagagtccatcaggaggctgggcctccactgcctctgctggctcatgggaagctggaattcatgctctctatagcccctgccatatgaatataaagatcaccttgtacaatactccaaccatcaagaccatcttcatgatagacacaaaatggccttacagtgcttcacaaagtccccaaaaagactccttgccactcaactgtttcttcagaaaaatgaaaattgccaaggagaccagttcccgacaggacaaagctttgtaatacaccaagcagagcttctctgctgcccccatacagagctccaagaataggaatcactgtggcccttccctaagctcagaggaatgggaccctagactcaggaaccaactacccaatcccacatgatacagatggaaaagctgaggcccagaaaagagaagaaaacttacaagcccagctaattggtagtggttgcctagaatcctgtgttcagaaggattccaaggccttatctcaggtccaaagaaatgagtgctgcaatcaactgatgatgtctgccatgagcagagacatgtaggaatggaatagtcaaagggcactgagcaaactggaaagaggagtctcctgactcccaatgctagatgcttttcaggtttcctcttccaaaaaaggagctgtccattctctttgagagatgaggctttggtgttcccaaaatcctgttggtcacagagagacaagaggccctgacagataccgtatgatatggtttggctgtgtcctcacccaaatctcatcttgaattgtagttcccataatccccacttgtggtgggagggacctggtgggaggtaactgaatcatgggggtggtttcccccatgctattctagcgatagtgagtaagttctcatgagatctgatggttgtattaaggggcttccctctttgctcagctctcattcttctccttcctgccaccatgtgaagaaggacatgtttgtttccccttccaacatgattgttagtttcctgaggccttcccagccatgcacaactgtgagtcaattaaacctctttccttcataaattacccagtcttgggtatttattcacagcagcatgagaatgaactaatatactgtagaactgtgttggagtctggagaggaatctccagccagataggtcagctgtgacatcagctgatggtgaggattgcccaaagtggacacaaagcagcccggacaaccgaggagagccagtcagtgtttcctagagcctggggtaataagagctgcaagacctgaatatgcttcagggcacactgtagattgtggttcccacagaggtagccagagcctaagcaggtggctttccagacacgaaatgatccaaattgagctcaaggggcatctgggcatattcctgatcacttcttgggaaaccaggggtacttgcacacacctgatgccagaactagccatccatcccagaatactcctcaactcaattacatccctgcctgtaaaactagcatcagtgtattgagggcaagagagggtgcatagctcctccctcatcttatttcactgatggagaaactgaggcaacatgacaagtcacaggcagatccagtggttactgtttatggcacattttcttttctttttcttttttttttttttgagaaggagtctcgctctgtcacccaggctggagtgcagtggcacgatcttggcttcctgccacctctgcctcctgggttcaagcaattctctgcctcggtaggaatcctgagtagctgggattacaggcacccaccaccacacccggctaatatttgtatttttagtagagacaaggtttcaccatcttagtcaggctggtcttgaactcctgaccttgcgatccacctgccttggcctcccaaagtgctgggatcacaggcgtgagccaccacgcccagctgtatgacacattttctatgtgccaggtcctttgccagctttttctcaattgattctcacacattccctatgaggtaggtactattaacaacccctttttataactgtgcaaagtgacactccaagaaggaaagtaacttctgagcgcacagacattgcaagtggcagatgcccccacccacttactaaccaccaggctacactgcttcaccaggccctggagccagtccaaggcccatatccctgctggacctgctccctctttcttgaggtccaccatgcacaagcacagtaccaggccccgtgacttgaaccaggtacaggtcttaagctttacaaccccacctgccattgaggcaaagtcagtggtggatgaccaggctaggctgggtctgatgccaagcactaatgaatgttgctggcctctttcctcactggatggcaggtaaagtagcctgctgcttaaatagcctatgcagaagcaaacctggagattgtggtaggcagaataataattaccccaaagatgtccaagtcttaacttccaaaacatatgaatatgttacgttacatggtaaaatggaattaaggttgacaattggctgaccttaaaataaagagattatcctggattatccacatgggtctgttgtaatcacaagggtccttaaatgtgcaggagggaggcagaagaggaggttgaggtgatgcaatatgagaaggacccaaccagcaattactagtattgaagatggaaggaggccatatgccaagaaatgtgagcagcctctaagaactggaaaggcaaggaaatggatttttccctaagagcatccagaaaggaatgcggccctgccaacaccttaattttaacccagtgacatctgggtcagacttctgacctacagaactctaagatactattttttgtttgttgttttaagccactgtgcttatggtaatttgttacagcagtaatagcaaactaatacagattttggtaccaggagtggggtgctatgagaacaaatacctaaaatcatggaagtggctctggaattgggcagcgatcagagggtagaagaattttgaggagtatgatttatttaaaagcctaggtaaccttgaacagattaatggaaacatagatattaatgactctgttaataaagactcagaagaaagtaaggaacacatcagagaaaacctaaatcactttaggaaatatctaaatcatcatgaacagactattaagagaaatatggatattaataaaggcactgacagtgaaactgaaggaagggggatccttgatacttggtggcagaaagctaagtgaaattatgactcacagttatgtgggaagcagaactttcatggataaacttggatacttagctaagtagatttccaagcaaactgtggaaggtatgggctggtttcttcttgctgctaaaaagaaaaaagattaagaaaagaactgttaagcaggccaggcgcagtgctcacgcctgtaatcccagcactttgggaggctgaggcaggcggatcacctgaggtcgggagttcgagaccagcctgaccaacatggagaaaccccgtctctactaaaaatacaaaaattagctgggcatggtggcacatgcctgtaattccaggtactcccagctattcaggaggctgaggcaggagaatcgcttgaacccagaaggtggaggttgtggtgagccaagatcatgccactgcactccagcctgggtgacagagcaagactccatctcaaaaaaaaaagaaaaaagaaaaaaaaaactctaagagatttacttacaagaaagcatgctccggagaaaaagctgaaggtaggactgcacatattgctaatatctcaggaaaatcaaaatgccagagtattgagtattcagtcacaacaaaggctctttggtgagattaagggtgtgactcacagatctcctagatcaaattagagagcatctaggaaatttgggggtattgctctggagcaatctcagcaaaagacaaaagtagagaagggattatccaggaaatatctgtagaggaccatcttgaataatggagaaaatacccatgacatacacaggagactcacaaggttcttgaaaagtttatactgacagaaacactgccagcttaaaccaaaaaggacagagagagtacaggatgaaagaagtctgttggacacccaaaacttcacaagcaggaaacaggttaataaaactactcagatgaaagtacatgctacctttcatggggaaaaaagggatgactaagcgggcagaacctcaagcccagagggtggagccatgagccatagtggatgagatcactactggaccaggttcagattccagaactgtgtaaccatgggcaagcatatcccctctttgtgctttcatttccccatctcttgatagagagaatccgacgaacaggtctctaagaggctttgtagctcttacagtctgttatcacttaatgatgtctgtgcctgccctgggtacagagtaagtctcaggtggtaggtatcccagctctctactatctcctagttcgggtggttttttaattcagcacatatttaggatgcctgctctaaatatccagttttccaaagggtgtagaggtacccagcattcttaggtttctatgctcttatctgtccaatctccgtgtcaattaattactgtttaaacattaaacactaaagaaaccctttactgctttgaagtacacacacacacacacacacacacacacacagggagagagagagagagagagagaatcccttcaattgtaacatcagtactgcacctagatatctgacaggagaagtgtaaaggattaagtttgacccctgggacatcaaaagtccaccctgggaaaggaaagggatgaggctattggaggttctttcctcagaggtaagccaaggagctccacaaaggtgaccagaagctgacatggctcttcctgaaatctcgagttagaattatgctattagcaaaaataatagcagcacctattcactcattcctcctccagggagctgagagtttcttacgaatgggatctcatcatccccaaagtataagcaaggaaaagtagggatcattccttcggtttgggagaaaaaagactcagaggtcactggacatctcaaagacagagactgaccaggcctgcccttctccagccagctctgggggctgctgaaatgccatgtgacagtgaacagctgccaccaaggcccttaacaaaacttccagggactcaaaacttagcttaggctgctaagcttgaagaaactcagtcaattgcagggagacgtcagccctgagggacagcagagccatgagtaagagtgtgcactggcttgctcagccatcattagctgtgagaccatgggaaaattactgcccctctctgagtgcccatgtcctggggaaactaaaagtaactaccttacaaagtggttaatgtttacatactgctaaacattggatgaacattggctaaataagataaaggggttcctaatgtaactgacactattatcattcatcgtaaatcccataatctacagggcatttaacattttgcgcagcacctcacacccattatccatttgacatctggagcaactctgtgcagtggtggtggtcatggtggttttgttattgttattatccccatattacgagtaagtggggggccacacacccaggcatcctgggatggaacccagcatcccattcagttagtgaatccctctcaccctcataaacagctgagcttacacagtaagttgtgtggtcaccccagtaatgaggaaaaagaacagagaggttaggtcacatcctgacatcacaaagtgactggaagagctaggcctgaacttccaacccagggctcttagccagctggactgggagaaatgatgccctgagcaatgggtcataggtcatcatggctgtcctcccactggacagtctgggggccacccagttatcagtattagtgattttgtgaaaatgccaacatttacaaatcaagaattcccaactttttgttgttgttgttccttaattcacagtcacttttggctttttttttttcttttttcttagagacagggtctccctctgtcacctaggctgtagtgcagtgatgcaatcatggctcactgcagactcaacctcctgggctcaagcgatcctcctgcctcagcttcccaagtagctgggaccacaggtgcgtgccaccatgcctggctaattttaatttttttttttttgtagagacagggtctctctatgttgcacaggctggtctcaaactcctggcctcaagggatcctcctgcctcagcctcccaaagcactgggattacagtcataagccaccacgcctggcccacttacggtttttcttgaaggagaagaaggcctgggagcacagactctgcatctggcatgtggaagatggagctcagctggggcttcttggaggagggacccccacccccctgcatgcccagcaccccaggacttccctcaccattagggggtgtcccgggccttggagacatctgtgtttgcctggtggctgagagccggcagcagggcttagactcccagctcccccacttactatgtgtgtgaccttagccaagtgaatgacccttgctcaattttacagatggagaaacctgtctcagttttcacatctgtaaaatggggatgactatttatagacccaactatagagttgttttaaagatgaaatcagtgaatatctgtaaggcgttatatatgacaaatgttctataatgcctaaaatagtcactggctactggctcccaaatcaccataaggtggtcacaggacaaggagaggctggcaatggctggaatggtttgaggggacacaagacacagtgtcacctccctgagccctgattgataaccaacagggtctaagctaaacctacagttacccgtgcacaagatggttttcaaacaaagcaaactcaacctgccaaaattctcagagggcccctgccatttacaatcccaggacatcagccctgaaaggagcttcaagacccctcattatacagatggagcccaacgctctcattacacaaacagagaatctaaggtactgggagccatccatggcttggatgtgggtccctcagctcatggtggagggggtgggggatgaggctcagactcccagaacactccctcccccgcccccacatggctgctggacatgcagggcaaggacgcgtccacctttccccttgaagcctctgacctcgcagaacacacagcctgccaggcagctccatcccttagacaaatttacttagcactgatattgaaaatgcaattgagctcgagttttattgcagaaattaaacagactaggaaaggggaaaaaaaaaaagccagtgctcatcagctcacccgagagctggctgtgatcaaacttgctaaagaggagcctagtgatcaactcctgccagcaaggaagagccccccaagtctgcccctacaagggactccccaggggcacgaggagctcaggagctccggaaggttctcctgccagcctcctggcgtggacctcctgcgcaccctgacatcgcctgcccgcctcttcacaaggagttggcgccttgtgaagtcatctccgtgagcttcatgaagcaacaccgccaagggcctgagcaaagggcgctctgctccactcgagtgaaagcaaaatgctttcggggttgaatcactgtttttcttgactccctttggagatcggcagagcccacattcggccgtgttcgtggacctgggactggaaacagctgcgctctaattacatgtaaagtgtaccaaaacatcccttttatcacagactggaaatctgttagcatctgcctctcctttgtttcttccacaagatacaagcttgtttctacatttttctcacctgtagcagtgattaaaattcattataaatgaaaggagtgaacagagaaacaagttcctctgtgtaccgttctaaactcaaattagaaacagctgtttgctaattcatgcagtgatgttttgtcgtgctctgtgaatcaataataactcaccctattgctgcagaaatttttggataatccacatatttaacgcggcattggattctccaggcagggctgcagcggcaaaacctcaggcgggtgggaggggacttggggtccccactctggaggcgtcccctgctgcccagacagagaacccctaactcagagctgcccagcacctctacccactacacaagtcttgggaggacctgaaggaaaccctgaacaggcgcctcatctccttccctccccaagaaccaccaaaaaaaaaaaaaaaaaaaagaattcaactctgattaaacgcaaaccacacacatcctccagccgccggagggaacagcaaaattaaaagtctaattggtacccggaacaatttaaaactattaagtataggtgaagcttttctgtaagaaaataatcctctgattgggattaggcatgtttggatagcatttttcccatccacacattttagctgcagaagttacagctaaggtctggacatgctcaggagcctctgagaagtgttcagtcatcccctttgccacctccagggaaaggggtgggtggggtgcagagctgcatccccatctgatggcttagagggaagcagatgctctctctcctttgcagggagggagatggacaacacttttggaggcttgtactgccactgtggcatgccaaacctactctatcctggctaacacatgcccatccttcaagacactgcctcccggaagccttccctgactgcctctgtcatcctccctgacttcagggcactacctgtttatatttgagtggttggggtgtccctgtgtctcctgcatctttctaggtctggggcattgtcatagtgaaccactttttgaacttcagactggtagcctctgcagagccctttctgtggccagacacagtgccaagctcttcgtaagctccattttgttaaactctcacctgcatcctatgtggtgaccactaccaccattaacccccatcttacagatcagacatctgagacatagagagggcgagggccctgacttccacagcaattaagtagaaggagcttggaatgactccatagatctccagaaagccatcaagaccacccactgtcatcaaagatgtataccgagcatgcctcacctgctccagctcctgagccttcattcaggccatggtggtcactgcccccgaaagcccaacccatgacttgggggccagctctgcccacctccccaagcatctcacaggtggtggtgggaagggtggtctcctgcatggctaagagtaggtcctcatttcctcctttcctggtgttcatctgggcctacagaagatggcagtccaatacgtcctggggggcgtagagcacaggccccaggcaggggcatggacaaggagctcatgctgtccctgcagggttgtagggagctttcccttagccaaggccactgggtgccagaagctccaagcccgggagggctgggaatggaaatgcacagatgaggtgccatcatgggaggcaggagcactcaaattgggctttgaagaaggagtaggagctccactgatctgtgttcttccaaacatgggctacctcccattggtaggacccgtgatcattttagggcgcagccaagatggtcttaaataaccctgatgcacaaatgagaaagttagcgccctttccattctgttgtcagccttcagattaggccagggagaaaggctgtctctaactcctctccagcatttcagcaaaagagagggcagagtccacgcttagcatttccagaacacagcagctcatgtctggaatagtgtgagcatggaattttcttcggttttgttttttatttacttttaaggttactgtcatcttacagtaaatgatactggttttccatttgcagaattaagtaaattaattaatttaaccacaaaagagccagcaaagacaaatactaggtgaatcatagcatcagtgatactcaaatgttgcaagaatcacagtagagatatgcaaatgactaaagcctgggacctccagatacagagagatgggaggagaaggcctcctgggagaagcaatggcgggagccatggctgaagcttgggtatcagtgggagaagcagcttagaaggtgcaatgagagcccatcgtcaagaccttaaataccaagccaaggagccaagaactccattccacaggccctggcaaccaccaacactatctgaaacactagctcatgagtaagtgggatctggactccccagcccagggctctttctagacctcccataactccaggtctgcgaatgactgagagttaaacaatcactagcctataagcagaacccatttcaaggaaaacagtgatcagtgaccccaacgacccagggctctcaacagccaagatcaggtgcccctgcaggagaaaacccctgcacaatcagcatggggtccccttccacgtgggggctgaacactcaagtcactgtggacagcagaagtatcaactcccctcacaaggatccctgctggggcactgagggggatgggcgcaccacctttcagtgagtccaacccagccagcttttcctccacttttggaataaattgccatgtcctctgtgtgaaagagccaaggtgttcccaaatacacaccatggacctcaacatgctgaacaggtgtctgctcccacaggaggggagtgtggaagccgaaagcccagaacagcatccatctcacggtcacttcgcccctgaacccacaccactgaattatttttcttccacaaacccacgcagtcattcccttgcagagcacatacaattgaagcactgaatgctaagtgggtgcacgaggtaactccagtggggttttgttcatcgggtccagggcaagtctccaactctccaagtgtctgtcccacctccctctctcctcccacccccaccctggctacctagggacccgagtcaaaggtcttctgacttccagtcctccatcccatctacactgcaaatccttctgacagtggtgccccacgttggggcagtgtaggtgagacggaggactgaatgcagctggtttatgtgactttcttaccagagatgcagacagaggaagctctcaatgcgaataaagaatgggcaagcggaggccaggtgcagtggctcgtgcctgtaatcccacacactttgggaggctgaggcgggtggatcacctgaggtcaggagttcaagaccagcctggccaacatggtgaaaccccgtctctactaaaattataaaaattagccaggtgtggtggtgcacgcctgtaaccccaattactcgggaggctaaggcaagaggattgcttgaacccagggggcagaggttgcagtgagccaagactgtaccactgcatccagcctggatgacagagcaagactctgtcttaaaaaaaaaagaaaaaaaaaggcaagtgggtaaatggatgaccaagttcatcttataattttcccaaaagccagtatcagagaaaaccccataatgcctccaagctagaactctgagcttagaccaactggcgacactgaagaataattaatagattatactttgtattctatatcatacattgcatatgtacgtataggtctaatcaatgatgtttattaagtgccacatatttcttgggtgtttgatccatgtcacgtgttgtctcattttattttttgtctccaagaaaaaaaatgagttgtctcattttaatattcacagcaatctgatgtgttcctattaccagccccattttatagatgagaaaactgaggcttataaaggttaattgacaggctcagggccttacaggtggagatggcctagcagggctttgaacatggattccctgacctcagaggctgtgttcctaaccaccgcgggatatgagtttatgaaccaccatgtcccagggaaagagagggagtgacacccgttcaggggcacaagcattctgccaaggaggtggcctcccgtggagcccagcctgacaggatgtctggattgggtccgtattctcagcctggacacctctcagggtgacacgctcctttggctggagacttccacagacaagcggcacacactgtgtgacctcaaatcacagatcccctgcttctcagtcaaatcccatccaggacctagccccagggtcccaccccaagtatctggaggatggagaaactccccaaaaacactccctgtctccagccatgtgccaggtgccctccagcagctccaggagacagtcatgagcttggtccaattttatggaagggaacgctgagggacagaggaactcagggacctgatgtgtgcatcatggccagtggccccctgggaattcagcagctgcagggacagtctgagtaaaagagcctgaggccccacctccaggtgtctgcctgtctcaagtctgaccccaaagggaggggaggtgatgcccccaggggcaaccttcacctaaaagggcctggagccagtgggctcctctgaagaccattcctggggcaccctgcagacacgaaggttttggcagtttcaagcccagtggtctacagcagcaggctcaacactgcaccccaaaatcggcctttccctggccctgtctcctccgtcctacttcctgggagtgcctcctcgccacatatgtgcactaagtccttgcttcaggctctgtgttcaggggtcctccctgcaacactgactaaggtacaactgccacagatggtggtgtcagacttggaagccatgtctttcagcctgcatagcctcctccacagcccctaatctgcacctgccaggatttgccatgctcaagtcactgagaggccaccgtcagggtctgtgtcctatactattactcaaccttgtcctttcaacgacctcaggactaacaatgtcaggtacccaagtgtaatcctaaatcatgatattgatgaaatcatgagtatgatgtttttgtaatgcccattaaaataaagatgtaattgggttaaacatgcatgaaccaccagaaactgggctgggcagccctagatgtggcgcaagtcctgctgccctggcccatactgcagtgactgcagctcttggtctgtccctctccccctccagacagggcagtgcagggacgagggcgcaccttcatagctgctgtgtccccagcaccgtgcctggccagaggcaggcaggagagaagaggtgggctgggcgctgcaaggagcccggggcctgaggagggccaggaagagaagagccagagcattttcaaggatgtgctgggctagccaggcggcccctctgagggccccactcacccctaaactcatccaaatctacaacacgacagaggaaattccaattttcccgattttcatgtttccacccctagagtaattgtcgtcgtggactttgtagctgggctgttgagcctcatggctgaaggctgccccagccctgcccgtgatgggcaggagatgaaaacgactcatcaggcctggggaaggctctgggatatggcagcagcagcagagaggcagccacctggccctggaccaccacgaggaggaggagttccagtttgtttggccagcacgtcaggtccctgaaggcagctgtggcagggcattcccctgactggattccggagtgtggggcagggcccctgaagtcctaggcatcaaggctggggcatgtgggtcccccaccctttcccagcatcgctgactctttccttggaacccccgccccagcaccctgcctgtccctgctttctcagcccgagtggccaccacctcctcccactggaaccaggccctcatctgtgtgcctcattatgtgctcctgctcacaaacagacctgaatatcagccacactcaccagacacttcctacgtgccgggctttcttaaaatctatattatttatttactcactcatattagtctttgatgttttacttgttttagcggggggtggtttgggtttttaaatttgaaatagagtcccactctgtcgcccaggctgcagtgcagtggcgcaatcatagctcactgtggcctcaacctcctaggctcatgtgatcctcccacctcagcctcccaagtagctgggactacaggtgtgccaccactcctggctaattttttatatttttttgtagaaatgaggactcgctatgtatgttgccaggctgatctcaaactcctgggctaaaccaatcctcctgcctcagcctgccaaagtgtcagaattgcaggcgtgagccactgtgctcggccgttttactatttaatgcatttaagccacacataatcctttcactagaccccccattttacgatgtattgtgcattgtacacatcgggatactgaggcccttgaggtctgagggagggacttgccccagggcagagtccggcagagccaggagaatctggccacctgactcatcagccatatgaaatgttgagatgtggggtttatgggaaacacacccctgacacacatactctcaagaggaggccgggtggacagtgtaatgcaggggagagagaaactgatggagagcgatcagtcaccccagatcctgcacatggcacacgaggggcttcaggtgcccaccgctgcaggcactggtaccctcctcatagaggggtctgggaaggggagatgccacccccagcccagctcaggctgacggcacccctgtgggtggtgctgggcctacagtctgccacaggcagctccacggtccccaaatggtccccagctcctcccagcacccagcacacagtaggccctcaatatttgccaaatgagtcaatggatgcacactttagtcaggccactcgtcagggtggggtgcagggccagaagggagctgcaccttccttcctcctcctccacccgcaatatacctctcaaccacttcccttatgcttttttatcttcttccaagaatgtgattaaggtttcctcacaggtactcctggcttcgaactgcctggagacaattctgataagccctggattcctggatccctggatccctgggagcccccacaaggtgcctggcaataactatctgctcaatgactgaatgaatgaatggatgaaagggtacctggcctacgggaagctcttggtaactgtggcatgaataaatgaataaatggatggatggatggatgaaatactgaagtccagggcttcgtctaaaggaggcacttgaaaactatggtatgaatgaattcagaatgagaaaatgagaaaacgaatgaatgaatgaatgaatgaatgaatgaatagtctaatcacaaagaagcagcaaggagccactcaagaggcccctgtaaggtggggcctaggagttggggacagagcctccagctggaagccagggagtatataagcctgacctgaccaccctcctgaccacctgggtccagtggggctgcccccagcagagcctgtccagcatcaccaaggtccctcgggccccctctcattatggcagaatgcaattactccagtcttcagtggggtctgaatttgttatgattttatttgaaagagcctcttggagccagggaagcagcaagggtgtgggggtcaggaagcacggacggaggcagaaggaacagctcagctacacagcctcagcctgaatcccagagaaatgacattaaaacaaaggagacacagagctggggcagggtgtggggggatggggggggagcttacttattcagaccagagccaaacaaatggatagatttaataagataataagctcagattccatgctcttaaagatacagactggggctgggcatggtgactcacacctataatcccagcactttgggaggccaaggagggtggatcacctgaggttaggcgttcaagaccagcctggccaacatggtgaaaccttgtctctactaaaaatacaaaaattagctaggtgtgatggtgggcgcctgtaatcccagctactcaggaggctgaagcagaattacttgaacctgggacgcagaggttgcagtaagccgagatcgcaccattgcactccagcccaggcgacacagtgagacttcatctcaaaaaaaaaaaaaaaaagacacagactcaacagtgggatttggggtgggagtctccatatttttccgggaaaacacccctcaagtggatgcctttcttcacacaccacactggagaataagggtatgtgaatatgcatgtatatgcttgcaggcatgtgtgtcttccccaccaggggggacccccaaaactcaccagaaacctccttacttcctaaccaggacctgtgaacaaatgcacccctccacaaggaacacacagccaagcagtgcccttgtaattttttcaggaggaattcgggccagccaagcacaagtcggtgtcacctccttcccagcctgggcttccctgtctctgtccaatggaccaacagtaaaaagtgagcacttcccgctcatcttgggaaacacctcgcatccactcactcaatcagccagcgactgcactgttgaaatatttatggagtgcctcttctgtgccaggctctgctgcaattcctggggcagtgagcacacccagcaaagccctgcaccatggaggctgcattccgggggcatcaggatcatgtccaggaaggctctggagccagagagcctccgttcaaatctcagctctaccactgaccagtggtgtaaaccaggatacgttaatggacctctctaatcttcaccaagagggaaaacaggcagaatcccttctgcctcctcgggttgtgcacaggatgagatcagataccgcaggttaagcacactggcccagcgcctggtacatggcacatgctcaatgaacagatcattgtgtgtggtttccagtccagtggcagcaaacacagagaccgctgggcagagccgtggttcactgtgagacccccgcccttggggaactccacccccactcccaggttacccttctcgcgggcatccccaatttaccacctccttatgtcattcctgccaatgtcatgtcataaagaaagccagtccccctgaagggctctggtccaccccaaaaagtccttaaatcccttctacaaagaggtttggtcccttccaatgaaggggaatccactcccttctgaactcccttagtctgcaggaagaaatgatctcctgatgagccccaaaggagggcctgctgacctcctctcagggacaggaataacaggaccctctgactccaaccatcctccaagaggaaggacaaacagcgagtcacctgcgatatggcagccattttttaaaatgacattgcaatttacattcatttattccttctataaatacgaataagtgcctactctgccagccctgttcgaggctctggggatagggtatgaagaaacaaagtccttgccctcagtgagcttacaatgcaaagagaggagactaaatcttcctgctgaagaaggaataaatcagtccgtagtaaatcacgtgttgctatgaagaagtgcagggcaggaaaagggtgaagggtggggtgccactctggacaggtgacaaggcgacacttgagcagacaccagaagcaaacaaggcagcaggccaaggcagaatctagagagagaggatcccaggcagggatctagcaggtgcaagcaccccaaagccagagcatgcaaacttttcagggcacattttctgagatgcccacgtggggctcagtgtgaaggcatgtgccctgccttctaagatcacaggccaagctgtcatccaaaaccccacagggacccaaaatccaaccccagcatcaactcactgtatgatctgactctggtctctcaacctctctggtcttggtttcggcaacagctaatcagaactgagcattatccaagcaggcgctggcagaggaggcccccagagtcctcccgagtctgcagctctatgcaaagcgcacccaccattcctctccaccccatcgcgccattctcacaccccgcgccagcaacaccacgcaggattggtactcctgccaaaatagctattaacccagtagccaataataacacgttatcctatcaatttgcttctgaaacgctgtgtaattgcagaacctaagtttgccatctcggtagcctggttaccacataaacagaaagaaactcaccagcctcttcctgaggagaacaagtggctggccacgagaaacacccgattaccactgaggccccccagcccacccccctcgaggccctacagaatccatcaggaatcatagtctggcattcagtacttcagaggctagtctcaatgtccccttggcatgccgcccctgtgactggagaggggaccagtgcccgggatgggatggctttttaggtggcaaagtcaggcccggcagctgcactctggtggcctccctcccggccagtggtgcaggaagtgggacagacatgaggcttcaggagggcacgggagagggcaggagccagaggcaggcaagcacttgagtgcaaaaaccatcacagatgcaagccagccctccccacgggagacagaggggacaggaggtcaatgggtggggcacagagggaaggacaggagagaggcaagggagggactccagacctaggagtcagggtgcaccccagggccctccccatccccatgccgcagggccccacccaggtctgacaccctggccaccaccacctgcttggcagctggccgcccacttttcctctctcattccagaaaaaaacgtttccttccttctggatttcattccactctgagcaaacattccactccccaacgcgccgggagcctctaaggggactcggcgttccggtgcagacaccagcctgttttattcattcttcccccttccaacccagccaccccctcatcactgtcccatgcctccgcttacctttccccctgctcaccagggcgtcccagggcaaactggccgatgccaagagggccagaacctgagcccgggttcccagcacccggcggcagggcaggcgagggctggagaggcgcttcccaccggcccactggtgatctcagccacgggacgcatccccacccggccgcctgggccggcggagaaggatgggccgagggtgtgctgctcccgcggcggcgcttggcggaggacccagctagcgggagaggaagggccttggggaagaaaaggggctgggaaaaggcacagatggggagggagaggacagaggaggcccagggctcaggccacgcggccagatgttgacccagttgagggatccaggccccgggggcgaccgaggagttctggctcccctgccagctctgagattctacagagatggaggagggcctggggccggcgccatgccagggcctggtgctgaggctggggttaaagggaggaccacagaaagggagcaaggggtctctctcggacactgcccctgtctgccaggacagggtggggggacggcccctgggaggcccctgggtggggtgggtggggagctgtctgcgggaagcagctctcagcaaatgaaaaccaggccttggaaactggccgggccacagccagggcacagctccagggaaaaccccgctgctcaccgaaaggtgccccaaccagagcgaaaggtgatgttaaaatgaacgagctaggaggggccaggcagcttgagcgagatcgggggtggcccctggctacagccccacgatccctgctcttttgtgctctgaacgcccctcattgtgggcacattgtactcccaaggcctgcttgcctgtaagtgctgtaaaaagccaactaactgcgcaattttcttcccttggcttccctccgctcagccttggtcaggttatcagctgagctgggcctggggctggggactggcctggctaggcaggcctgaagtccccacacccgccatatttggaaattcaactctcaacggtgcattgaggcccaaggggtggcacttccaaattggtgggacaccagggttctgccatcaagagcttggtgggtagcggcattcagtaaatatagatgtcacccacacatcctttcattcattaattcacccatttagttattcacaggatgtctctgatgtgcctacaacccagcaggcacttaggtggtgagggtaggagggtgagccacactggcagctcttggcctgtggagctcgcagcctaggtggagggacaacatttgatcccctgtgtttgctaggagaagtgtgtggggcctggggggagaacaggggcgcagtaagggtgccagagccctcctggaaaaagcaggctctccgtggagaccagcaggatgaagaattcaccaagtgaaggaagcaaggggcagaaatgagctccaagcggcaggaccagcaagagcaaaggcctggaagtgagactgaggtctctgacaggtttcacggagcctcctccgctcctcactctcagccacagtgggtggcccagccctggtagcaccgccccccaccccagctcacagactcggggagccccccatcagcacctctggaggccaatcccacaaagccatcatccagccgtctctttcccagctgaagttctagttaaaaatgttttcatatgtttatttttaaggggggatgggaagacagaagggagacctgaaggtctttttcttttcagaaaaaaagaaaattaataaataaatagagcctcaagaaaagggcatggaaaggtctctgcatctgtaaccactgaacaaattaaaattagctcatttaatcagctcctaatggcctggctgtcccgagtgggccccggaacacagcaaacttcacagcagaactgcgcaggccaatgtcagtttatcctacaacaaagggattttctaaatagtgcgatcaaaacgcagcgaaggccggggagagctggggagacggaatgcggccccccagatcctggctggcccccgcctcccagcttcgtccctttgaaaggaattgttcttttggcttttgttctaattatctaaacatgtgtgtaactctgttctacaaagagtgttttaacccgcagaggaggtaactgtagcccctaccatacgttactggggccctgctcccaatcctcacgcctttaatacttctccattccccacctgccttcgacagaggcgtaaacacacctacgacatacagccacctacacacgccagttacattcacaaacacagagttacaaacacacagttctatacacatgatcacgtattaaaccagctacatacacgtagttataagtgaacagttacatacatgcacggttgcctattccacacacataaagttacacagacacacagttctatatacacagtcacatataacacattacatatgcatggttatactcaattacatgcatgcatgcacagttacattcccagagttatatacaccacacacaagtacatgtgcacacaatacacacagctcctcaagctcctgcctaacagctggagatgggggaggcccagctcaccagacccccagggagggccgctgggtgcacacctgaggcccaggctggtagtaaggactcttatttccctggagtagtttctctacgcaacttgccacctgggctaaatcattagggcaatggaggaggggaaacaaaaggccaggggagtggggctgggaccccagaaaaaagggcagggtgggaaagcatgatgccaggggtaagcacaagcccatggcccagtggggaggaaggaggccagccccatcaccgactccatcaccaacaccgacctcaaattcccttcccatggcctgtaaactggccagtctgcagctctgcctttaggcccagagcctccttgggtgctcagcccacagggaaataagcctggagtcagccagatcttgttgaaatccaactccaccacttactaactctgagcctccccttcctcatccaaaaaataagaaacaacagtagtccctatcccaaggggcagttgtgctgatttcattagagatgccagtaaaatgcctagtccagaacaaactgggtcagtgtttgccactctggcaaatgaaaggtgtgggcatggaggcccgagaagagaccatcagacagtgggtcggggcacagccagacaagagctagccatttggtgactttcaatttcttattcaaccctcatcccccgagtgaggaaggggagaattttaaaactggataaaagaaattaaacagggtaaaaagaggaaccaactgggatggagggaagccttcagaaaacttctggcccagagtcagaccattatcttctgaagacctgctctataggtatttacagcaacaccctggggtaaaagcaattgttatctccatgtcacagaaaaggaaaccgagggctgggcacagtggcccatgcctataatcccagcactttgggaagctgaggcaggaggatcccttgagcccaggagttcaagaccagcttgggcagcatagcaagaccctatgtttacaaaaaattaaaaaataatttagccaggtgtggtggtgcacacctgtagtcccagttacttgggaagctaaggcagggggatcacttgagcccaggaacttgaggctgcagtgagctatgactgcaccactgcactccagcctgggcaacagagtgagaccctgtctcaaaaataataatgataataaagaagaggagcatgaggctcagggaggtgagaagcctgggctggcagaggcagtgtgcaaagaggtctgtgtggctgcaagctgcatgctaatgcccagccccgctccaccttccttcccgaggcaacctgttctcccaactacaaactttctttagcaggactccagcaggtaggagagcctgaagttggcttctggctctgggaactacaagagcctcagaccacccaacccaaactcaggagtgtggcccttttccttgcaggagttcaccaagtcctcaagcccctaccccccacccacctcccatgctgagtaggaggtgggaaagaacctgtacacagaggccttactgtaaaatgggaaaacattttacagacttagaaactgaggccccgaaatggcaggggtgggaggctcaaactcccacaactcagaggctgactctgcaaaccttgagtcctcccaggatgggactcctaccttccttgcccttctcttgcccaggcaggtcctcctgggatctattaggtgagcagcattgttgagaccccagggagtgctcagaaaaagaacctggacacaggctccatccagaaggtcccactgggctagtggtagctgtcctggtcctgtttagggatcctgttttccacttgattggcagggcccaagctgacccctggtatgcctggaggtcagccaagatacagggaaggtggcaggagggtcagagccacctgatgcagcctcagtacagggagtaggacctggggaaacagttcccgctaacccactaacgctgcagacccacagcctgcaggctctcccagccccacccccagtaagcaccaggcccccaggaggaaggaggggtgggcagggaggtaagcacatgggctcgtgtttgaatcttggctctgtcatctacatgctgtgtgacctgggacaagtgacctcccctctctgagtcacaaacctcaactataaaatgaagatggtgacagtgcatgtctccttccttacttgaggactgaagggacgtttctagctcagtgtctggtcccccttccccagtggtaacccttagtaagcacagagagtggggagtggggagtgcagcatggtcttaaatccatctcaaccatgcgcggcagctcatgtctgtaatcctagcactttgggaggccgaggcaggcagatcacctgaggtcaggagttcgagaccagcctgaccaacatgaagaaaccctgtctctactaaaaatacaaaattagccaggtgtggtggcgcacacctgtaatcccagctactcgggaggctgaggtgggagaatcacttgaactcgggaggcggaggttgcagtgagctgagttcgcgccattgcactccagcctggataacaagagcgaaactccgtctcaaaaaaaaaaagaaaaagaaaaagaaaaaagaaaagaaaaaaaaatccatctcatctcccacatggcgaccctagaggcccaggccaccatccccaatgagtgggatatggggcacccttctttcagatgcagcaggactgtcccctgcccagcacagattcatctcagccattcttaagctaagcccagcaggcagccgacagggcagcccagaggacacggccaggccaggtggggtgcaaacctcttccttacgggatctgggcccaccaggcaggagttggacctagagaccccttggaaagcccaaaacttccctctcttaccatcaggattcagaagagaaccacatgaaaaaagagttggtgatatctccccctgcaccccctcaccatccaggtcaccccccacacagagcccagctgggctgggaaatcgggccctagccagggctcctgcttccctactccagagccagatggccctacacaagcctcccttctactctactccaagcctcagtttcccctccttggctctgcttacttcacagggctgcagtgagggtcagaggggaatgatggctgtggagatgctttgtaaactgtcgagagccattgccacacacgggattattgagggtaaccaggataggaaggggaggagacgccaagggcaagccccatctgtccgttcccctgcatcagggcagtggccccaccacgagaacagaggaaaaaaggccaagaagacaaagtcagggaggctcacgccagggctggatgctccctccagggccccagagtgcaggcaggagctgctgcagcccagcagttctgtttggtgacattggaaggggaaagcagacaacatgggtctctgggatgcggccacctggctcggcacccagcacacagtaggcatcacccactggttgagttctcccagccgccaaccctcagacaacctgcctctgcgagagttcagtgcagatgcccacagatggaagccagaaaaaaatatgactccttgcaaaagaagcagactgcaccatgtgtcccagctcagcaggctggtcccaaggcctcagaccccctcatggctgtggccctgtaaggatgggaaggcatggttttcccacttcatgggtcaccagcagctgtccctacctgcccaactctgccagcaggcaggctcaactagatgcaggcagccaacctagtgccaaggaataggcagaggaggagttggggctgcattctagtcctgcccacttttgccccctgtgccatctgcatctcggggacgcctctgttggggactcagtttccccacatgctccggctccccctgccccataagctgtgaaacccaagcaaaacagcacgctgcctcattctcagccaacgtaggctacaattaatctgaagcagggattttcttaattgctgggttttacaacccaatcgcaaagataaattacagctagctgacaacgccggcttgaggcgagacgtttaaagcatcctttttaagtgtgtgggctctttaaaaagctggtatgatgggaatggaattgtgcttgcagcctagatcggaggctacttcccttagggagtcaggccagcaacgccaggggacaaacctctcgaaggagatgtcttattggggagtaaaagtaaatacataaaagaagggaggtccacctgcaaccctcctaattgccttccttcacatgcagctgcagttccacactccacagccccttcaggtgtttcagcgccaacaggattcccgggactaggaaggcccagcttccctcattagctgtgcctggtcacccagggggcacagaagaaatggtgtcagcatgcacttggcagtgccctccaacacaaggatgactgccccctgggagaggcagtgagggtaagggacgaggtgtgaagggggtcccctctgatcttgttcttgcagggagctcaaggcctggcagcagccacgtccaaaacagacaaaccataggccctgggtcctgtagcccaccctaggaccaagcccggccttgatagttccatgaggtcccaagcacgcgtccacccgctacagggtgtcccacctccagccaagaggaatagcatgggtgtgcatgtgtgcatgcacatgacttccaagcaaacgagccctcccaccaccacccaccccgccctgcatggccaagagtgggaggaagaaaggaataggaagaaatccggcagtgctgctctgtgtgatgggtcaggtgatggctccacctaatgtctgctgagcaattattccgggagaggtgccccacacgttttattttattttttatttattatttttttttgaggcggagtctcactctgtcgcccaggctggagagtgctggtgcgatctcggctcattagcaacctccacctcctgggctcaagagattctcatgccttagcctcctgagtagctgggattacaggcagacaccaccaggctaggctaatctgtgtatttttagtagagatggggtttcaccatgttgcccaggctggtctcaaactcctgagatcaggcaatctgcctgcctcagcctcccaaagtgctaggactacaggcgtgagccaccgcgctcagcccacatcttttatttgcctgtccacaactccctaccccaaacccaaaccgtcagatgtggtccaaaattcagactttttcagattctagaaaggtgagacagtgcacttgctgcaaatttgggaacactccagcagcagtcaggcacactgatacttctgcagcaaaacatatcggtattcactaatgtgaacgaaataaagaccataaatagcttcacatcagctcaggtcaaacttggctgccaaatacattacagaaaaaaaaaattcaggtttctggctttctggaattcagaattgtgaataggggattctggacctccactgcctctttaatcttcctggtgaccctgtggggtaggtactattgctactcttgcttcccagagaggaaagtgaggcacaaagaagttaagaaataatttccccatagtctgtggggcagcagggcggaaaccatggccatctggcctggagggtctgcactctccatccccagggtgtcccatagttgaccaaagtacggagctgcagtttaaaagcctcctgaggctgggcatggtggttcacgcctgtaatcccagcactttgggaggccgaggcagatggatcacctgaggtcaggagttcaagaccagcctggccaacatggcgaaacctgtctctactaaaaatacaaaaattagccaggcatggtggcacatgcctgtaatcccagctactcgcgaggctgaggcaggagaaacacttgaaaccccaggcaacggaggttgcactgagccgagatcgcgtcattacactccagtctgggcgacagagtgaaactccatctcaaaaaaatttaaaaataagtacaataaaataaaataaaataaaagcctccgaaaaaagagtggagcatctgtaaatgtaccgagtgtccacagcctgccccaccacgcggtgtgatctatgggccagcctccaccaggaggcactcacctaggagttacacaaaccctgagtggcattcccacacctgcccagagccttgctggagcccaggagcccaaggcggtctcccaccagcaggtgaggctcaccaccccgccgtggtacacaggtaattactccctacctgacacagtctgcacagatcattttacccacaacaaatatgctaaacacagccccaggccaggagaaacatgctgcaggtaaatcccatttgacaggggctgaggcttccagcaggactcccagatgcctttgggaggagtggtgaccccatcccatcaaaatgacattggagccccacgactcccctggtcatctccaacttctcttgattggcaattttttcacccactgggaaagattgttgcataggcaaaatcctggcattctattaccaaataattacatgatcatttcataggcattaagacactcccaccagcgtgagcggtggtgtccagcgctaaccgaggctggcctggactgcgggtgcttgttaaggagaactccagcattgaggaaaacctccagctgcagctcccacactgccctggtttctaattaaaaattaaagcaggcatctttcctcagaaacccaattagcatcaagctgatggtacaaacacacatgtgcacaaacacatgggcacacgtgtgtcacatgcacatgcttatgcaaggtgtgcaaacacgtatgtatgcatgtgcacacacttgcacatgcacacaaacccttctgcccatggggggctacaaaccgccatctggtcatccattcagtctaccctgatgaggattcaccaagcatcacgcactccacgtgccccacaggaagaaacccagggccctgccttcaggagcatgagctctaaaggaggctgaggaaagtgcacaaggtaagacagtccatggtgggaccttaaaagggtccttaggaagcccagagagctcagttctggcagggtgatcagggacaccctgagacatgaaggcctgctgctgggtcttaatttatagaaaaaaatataaaaggccatggagcaggtagagaaaatagccagagcaaaggcaagcaaaggtagctggcactctgagaacaaaaattattctgagtgaaaaataggcaggtggaaaacgggtaaatgtagataacacaagagttctagcatgggtacttttttaaacctatatgaatttagctgtgtgctgagcaaaaagaaaatttgtgcacaggatctgagataggaatgagtgtgaaacgcaaacaaaattttgctgtgcagtccaacagctgatgttccagtaacctctcctaaagcaagtgtcaccgagtgcctaagggatttgtggtgtgtgtgtgtgcagagcacgcagtgtgttctcggctggggagcagtccagtcggtaatcctggccatgtgcatacgtgtgctgcagccgatgtgtacacggtgcgtcatcccactttacaagggaggacagggtggctctgagacgtgatgtcactctactggaaacacaaaaccagtcagggccagagcccacatctgaccccaggcagtgtggcccagagtccaccccctgcaccaccaggcggaacagagatgtgaacaaagctgtacttcagggaaaataatcaggcaggggtcctcaaggtggggtgggacaaagtgaaggcacagaccaaagcccgagaggcagccacgcagtgctgtgcagaggggcggaacggggctgcagccacagggatgctctgaggccttggaacagatgggaaggcagggaagagggcaccaggggactctgcggtctgagtgagattttcttcggtgactacagtttgtgagctcccagtggccggtttgtcttagaaagggactgagtcccagcccttcccctccaatcatgaccacccctgcttcctccatcttgcccttggtgagagaaaactccagcacaccaagatgtcctgggaagtccatccttcccaccacccaggtagacaggatggcaagcaggcaactgaacagccgcccagggcagagcgggaggcctgtggtgtgtggaattcatctgctgtgagatgatgctatttcttcatgcaacatgaccagggttggaaagataacactggaaacaaagtcaacatttatagctggtctactaacatgctgtgtgaccctggatacatcactaaacctctctgagcctcagcttcctctagctgttgactcactcatgtacagaggacccactatatgccaggtataagctctgtagttggtgacctttgcagttggtcagtgctgcatggctcatgggtctgaagcccaccctggatcatgcaggagaggcacgtacccacccaggtgctggaaccattaacctggccatctttgactaggaggcttgggaattacagcattcagccactcccagaatcccctccctgctggggtgataaccagcactgggggtgaactgccccacccctccctcagcggtgccctcagctggaattgggcacgttaaaactcagactccgggctgccacggcccccacaaccacgctgcaccaccccacccccctccagctgcctgtgcgccggctgctgctgctgctcatttccaggcaaatgttctagttaattaaaacacacccaagtgctcacacgcacatggagccaagctacaaaatcagttctaccaaacagcagctcctctgctccagcctgggatcgatgcaggccaggacaggggttccaaagttgatgttactggcaccgagactttgctcataagaccctacctgtatacacacctgtacacaaatgtaaaagcatatgtgtgcacctacacacgagcctgtgtgcacatgcaagccatatgtgcatgcacatgtgtgtgttctgaacacgtccatgagtgctccacacacaacactgtgcagaggtgtgcaacatccacgcacacacgcacctgcatacatatgcatggacacactcacacaggcatgcacacaccccacagtgcccccttctccaggaagtcttctccagctttttgggccttccagctcagaacatcagccatggttagtaaataaacacttgctgcatgagggagagaatgaataaataaatgaatccactgatcaatgatacagtgggcaaacgggaacagcccacaagtacaattatgcatcaccgcagattggattttccagagactggaggcgcagctctgcccttgcagctgtgctgcagagctccacgaggcactaactgagatacacacacacgcacacgggcatgtggctggaaaatgcacattcccagatctggacatccataacaaccaggaactggcaagggagggctgcagtcatccaggctaggagacagaaatcagtcacctttaatgggactttagtcccagaagggaaggtgcctggaggtccacaaggctgcctgacattctgggactaaatcagacacatggccttcacacaggcaggtgactctagggaacaaaaacagcctggagtaggtcaatcctgccctagcaagcatgtccagtatgctccaggtccaccgagaccaccttgcaggtggccacttctgcagccacaaacaactgttctttatgaggacctgacactcatacacaaatgtcaaccacttgacaccctagatgggcatggaaaggatttctgttcatggagatggggacagctgtgctgggcacctcaaaccacatcagttgaacaactgaccttctaactcatgccacggggctggcaaagctgtctacagagagcaaaggacgtgagaaggagggtttagaaaggagtggggatggtggacttagcggccatgggagtcagccactcaaaatgtggccctggaccagcaactcagcatcacatgagagctttttagaaatgtagaatttaggccaggcctggtggctcatgccagtaatcctagcactttgggaggccgaggtgggcggatcacctgaggtcaggagctcaagatcaccctggccaacatggtgaaaccccatctctactaaaaatacagaaattaccctggcgtggtggtgcgtgtctgtagtcccagctacccagaaggctgaggcaggagaatcgctggaacccgggaggcgaaggctgcagtgagtcatcatcacgccactgaactccagtgtgggcaacagagcgagactccaacatagaaacaagaaaagagaagagaagagaagataagagaagagaagagaagagaagagaagagaagagaagagaagagaagagaagagaagagaaaggaggggaagggaggggaggggaggggaggggaggaggggaggggagggaaggggagggtaggaggggaggggaggggagaggagaggagagagagaatggaagggaaggaaggaaggaaaagaaagaaaaagaaaagagaaagaagagaagagaaaagaaaaggaaaggaaaggaaagaaaagaaaagaattttgttgccaggtgcagtagcacatgcctataatctcagcactttgggaggcaggaggattgcttgagcccagaacttcaagaccagcatgggcaatgcagtgagaccctgtctctataaaatttttttaaaagtagctactagggaggctgacgtgggaggattgcttcagcccaggaagtaaaggctgcagtgagccatgatcacaccactgccctccggcctggataaaagagcaagaccctgtctcaaaaaaaaaaaaaaaagagagagagagagagagaatgattagaaatgcagaatttcaggtccacctggagctgctaaataagaatctgaatttcatacattccattagtaattatgttaagaatgaaatgaaaatatgacattttttggccaggcgcagtggctcacacttgtaatcccaacactttgggaggccgaggcgggtagatcatttgaggtcaggagttcaaagccagcccagccaacatggtgaaaccctgtctctactaaaaagacaaaaattagctgggcgtggtgatgggcgcctgtaatcccagctactcgggactctgaggcaggataattgcttgagcttgggaggtgaaggttgcagtgagccaagatcgcgccactgcactccagcccgggtgacagagcaagactccatctcaaaaataaaataaaatattacattttatttgaatgtatgtgttttattttttttttaaagctactatgctgttaggacataaatatttaagttgtttagacaactgtgaggtttttgttttgttttgttttgttttgttttgttttgcttaaggggcaccataaaaaagttaccgacactaaggtgccatgaactaggaaagtggggcgttcgagctctgtatcaggcatggttttgggtgatggcaaaacagcagagaatatcacaaagtccctgtcctcgtggagttgacagtccagtgggggaagcaacaataaaccagtaaacaagtgactgggcaagatgtcagggaactggaatcgaataaaaaaattaagcagggcaaagtattgattgccacctaccatgtgtgaggcactggcctcccatgctgtcctccctgtgccaggtgcctgatgggtgtctttcctccctctcctcacccctgcactgggaacaacctccagctcataatttgcactgacagatgttgggtatggctgtctttcacttgaaattttcaaagatctcacagaggtcctgtaggttagctgttgtgccctggggtgccacagcacacagtttggggaaaccaatctcaactatttattaagtgaatgaatacaaatcatgaagaggatctgacatgagatacaggaatcaattctcaatccatacaaatgctcagagataccttggagcactggctcacaacaccagccctcactgccctgagcctatcaggctctctgggcctcagtcaacccagtggtacacaggtcaggagcccacagtgactcgcaagcacactcccgggctcaagggatcctcccatctcagcttctcgaatagctcggactacaggtgtgtgccaccatgcctgaaaaattgtttttgttcagtatacacagggtctcactatgttgcccaggttggtcttgaacccctgggatcaagaaatcctcccactaatggcagcagcacccagtctggagcgaccgctgcaaagatgccagctgcagttggggaggcatggccagggctgcgccctccgtggagctggcgggagccggaaacaggtgggatctctgcccccttccaagttggcagggtgggatccccaccctccccagcacagctgcagccacctagctcttgggagcctgggaggcccccctctcctgtcctcacaggctcggaagtgcctgctcctgctgcctggcttctccctgctcccagcaccctctctgattttggagcaaagttgaggccaagcccagacactgtcatgacccggccagatgtgcatgcactcagggcagtgctgacatgccagccccctgccacctcagccccctccagacttttggtgcagatgagcatgggagggacaccaagagggagctaagggtggctcagcgtgggcctgcaggtgcccctcggcacaaacagtctgggtgctgtggatgatatgattgatggtggcaggaagcagacaggctcctgagcagaaaggggcgggtccccagtgaagccccacgttctagccagaaatggcctgaaacctggggtctgggctgtcagttccaggtggagtcccagcccagagtgagaacttatggtgctgtttctgggaccacccaaggatcaatcagtacgcacttcctcccttctgaagcccattacaccagactcagccagactcacagagatgttggaactaccagctgcaggaaggagctacccacttcgggtctcctgactcttcaggacaacctacctgtggaaaagagctacccactgtgggtctcctctgagctgagagctggacacaagttagtacaacctgtctgtggaaaggatctacccactgcggtctcctctcagctgagaactagacactcatggggacaacctgcctgaggcaaggagctacccactgcagtctcctctccactgagagctggacctgcctgcagaaaggagctacccactgcaggtgtcctctcagctgagagctgggcacttgttgggcgacctgcccatgggaaggagtggcccacttgaggtctgagaggtgttctgtcactcattgaagctcctctctgccttgctcactctccagttgtctgcatacctcattcttcctggacatgggacaagaacttggtacgtgctgaatggcaggacggaaagagctatgacacaaacagcacggaaaaacactccctgcttaccatgttgcaggcaatgagaaggacagaagagctgcagcccttcggtgagcccagacctagaggctccccaagccagggctgtgacaccttccttggggttctgtggttcctggcatctccaagcttccggacaccactgcattccccagtactcccagtggaagccacttacagtacacctggtccagccacagcctcacatggaaccagcacatggagctgcccgccccaccacagcagccagcatgcctggctgtgtgaagtggccggacttcatgctcacttgcctcacggctctgcacctggatcacccttggcaggtatgggatccaggctggtagcatgagccgagcacagcctgccaggtcaagggtgcagaacgagcccagcaggcatgagcaatatagtcaggcagaaggcactgctggccacagaggtttctggctggtgaagcaacaccccaaggatcctgtgacaccaacttaggctcccaaagtgctagaatcacaggtatgagccaccatgcccagccaagggcaaattttctaagaaatgtcggtgtccaaacagggcccctcagctctgcacaccttagagttggagcagcagacctttccaagtaggagaccaacaggctcgcccaaactcgacagtcagggattcccacttctggtgaacaaagcagaaagcactatgtggcggactcagtacaaactccaataggaaaggaagcgagaagtgaagggtggatttggggaaaaccaactgaacaccaaggtatcttttatcctaagccatgactgcagctgctctagtttggggaaaataaaatccaacagcatccagactacacagctcccatgtctaaataacaaaatgaaacatgggctctcttttggcagctttcttccccgtcagcaggagaactttggtaactgagtgctttttggggatacagagaggggagaaaaactctcatgtactcacgctgccaagttcacatcagcgacaggctttataaagcaaatggggcagatgtataaaccttggtgctggaaggatggactgggagattaaatgacagggtgtgtgcagcaaagtagagactaaatgagacctcaggccggatcgtttcaccacgatatcagggacttcaaagggatggctcccaggcctggcctgccagcaagggcagcccacaggcgtgcccacccccacagcctcggccactcccccaggtgcccatgggttcctggaggctgcagggatctgaatgctggcttcctggcctttcatattatgattttctttttctttttctttttaagacagggacttgctctgttacccaagctggagtgcagcgatgcaatcatggttcactgcagcctccacctcccaggcccaagagatcctcccctatcagcctcccaagtagctgggactacaggcacgcaccaccatgcccaacattatgattttcaaatatcagaattctttctgtacctaacaagctcccacccctcacagcccccatgtctatctccccttttgctctctgcctcccctcatccttcctccattccctccatttctgtcctctaattaccccccagtctcctgttcctcctccccttccccttcggaagccagctctcaccctacccatgtctttgctagcactcggccagtttcctctctgctctcccagagggtctgtcctgcctttctgcctgctcctgtcttcagccttcctcctgcccctttttctctcaaccccattttcccccaaccccattttccccccattctccaaccgtctccctggacctcaagaaagaaagtgcaagagagtgaatgaccatgctagagcttgctgtgagtgccagggctggccgagcacatcccacccctcctgctcaggaaaggagggtgggtgcagaaggcccggccccaagggagagccaagggatgccagatcctcccggtccacacttgcaatgccagggtctggagcagggacacagcctgagaattcccttcacctccctctgcagcaactgtcctggtctaggatcccaggagaggccttgcatctggcctgaacagaacctctgacagatgggatgccgccccgagtatgacaggaggacatgaaagatgggaagagaggagaggttggtggggatgctgagccgaaggaagaagcagaggtcagtcatgaggactgcccaggttcaaacaccatccctgctactccctgactgtgtggccttgggcaaattccctagcctctctgagcctcagtttcctcatctgtaaaatgggaacgatgtccaaagaactcaataaacagcaattattttgtcatgatggcaattcttacatctgcactgtgtattggcggctctgagtgggtgtcaggacttcgacggagtgggtatctaggagacgcccctaccacaaccagcgcagagccgcaaccccaccgggcacccgtgtcatgcaagggagcctcagggctgagggagccgcttttccgcctgtgccaataaagaaggggcccttctctaggctgcagagctgcagtgcccagaggagtggggacccgccctggccatctccctgtatttctccccagtaataatcttatgaacaggtggcagaggggtgcctggcgtctgcctccaactttgctatctgactattcactcaacaaatactcagctctcccgtgtggatcagtggggcattcaacagtgaccaaggacaaggcagcccctcaaggagcccattgtctcctgcaggagacagacactgaccagcaaattgcaccctggaagtgtaaaatcactactggagaaagagctacaaataactaaatacaaatatattctcatcttaatattgaaaatacattcttatacttaatataagtgtattccttctttggaatcgcaaatttcaggatgtgggcggtggaggagaccaaccctcatctctagacagagaacttgacacccagaggacaaaggaccaagttcactcagagccgcttagtggtaacccagggctagaattcagttctcctgactccaaattaaagaagtgctttcctctatgccacaaggtacattgagaatagttcccttaggggctactgtccaaaaagaaaccgggaggaagaggggccccctgggtgattccaatatgcctggtccgatgctcaacacttgacccacacctagcaccagctcctcgagagggcattaaaagcagctacaagacagcctggccaacactgtgagactctgtctctacaaaaaatttaaaacttagccaggcatgatggtgtgcgcctgtaatcccagcactttgggaggctgaggcaggcagatcgcttgagcccaggaaccagcctgggcaacatggcaaaaccacatctctactaaaaatttaaaaattagccaggcttagtggcgtgcacctgtagtcccagctacttgggagggtgaggcaggaggattgcttgagcctgggaggttaaaacagcagtgagctgtgattgtgccactgcactccagcctgggcagcagagcaagatctggtctcaaaaaattaaaataaaataaataagagcagctacaaggaccacagaccacagatgcaggtcagaccgtgaactccctgggcaaaaaaagcagaatatattagacaccctctggttggaatcctgtaaattctcatgtgtgcagacaaagaccaacacaaaagaaatatcatcaggaaaatagggtgtttgggtaatgaggaatttttttctcaaaatacaactaactgtgttgtctgagattcatccattgaattctcaggttgtaagactatagccacatggccagattatatcagggatatttagattctcaaattgccctggggaaaattaaagagacatttgtaaccatcttgaggatgtccatgccattaattaaatgttgaatggtgagggaaatgggtctatggtgggtgcctgatgttcccattttacagatgaagaaacctccccatggtctgcccagacctggtcatgcctctgttaaaagtctgctttgggctgaagatgaagaaaagagaagctgagcccctcaaggttctggtcaggatgtgagtggccccaggacgtaactctccttcagcccagagagcaaatctaggacccaagagcagcagtccagttcatgtagggggtggaacccgcatcttcctataagccctcccctcagcttgagccctgggcccctccaccaggttaagcagcaccccacttccaccccagcccagctgcaagaaggagctgccaaagttggtggacataaatgagggggccctgacacgcggccagctggagtgtgtgagggctggagccaggctctgcacacaccaggcaaagcagatttccacgcaatctagacagcgggcggaatctacagcccagaaaggcaggggcacgcgaaccaccaacaccggctgatggctgtcctcaggctcagaggcccagccaggccagccaagagggtttacaagggagtcaggaacactggacaggctgcccccatctggggccataacaagcgggcatccggcagcccagccaggcacaacagctcaagctcaagctcagggcctccctctggaaggtagcagcccccaaaactcaacatctgaagttggaggaggaggcagcccagggcagaatcttcccccatcaagcagcatccccatcccagcaagttttaactgatctgcagccttctagagcaggtctccacaacagatattaacaaggcacctactgtgtgccaggcatggactaggtgggctcagctagggatagagcaatggaggttcctgctcacatgcagcatggggtcttgaggggactgagcagcagccagggtctagttccttggactgacaccccactgtccctaccagctttgtcccccaggcccctgccctggtgcagttcagtcagaaaaggggaaagacttctctgcctccaatcctattcctccttcagcgctgtgtatttcaggagagacccctctgttcacctcgatgcccaagccaggaaaccagggatcctcctgggtttctccaaaatttaatccatttccacaccttgtcaacgtggtccctaggacggctctcgcacacaccctctgttctcggtccccactgcctgcagcaccatcctctccatgtccccacctgcccacgcccgtccttgacagggcattggcaggaactctgccaaggatgagtctgaggatgccaagacccccaccacccacactgctcctagaacataatacaaatgccccacctggtcccacccgtacacacgctctgctggctcaccacgctcccccatgctgcctaccaccaatccccccaacatgccagcgccctcctgacttgcagtcttcaaaccttccgtctggatggctatccccataatttctattcattgtttcgccctcgtttccagtgtccattcttcaaagaagcctttgcttctctctcatgccccatgctcttccttccagatgcttccacgcctagaagataaacgtagctatttatggggtggtttgtctagctgtccttctcccccacagactggaagctccacagggggagagtccaggcctgtccagctcactgttgtatgcccagcactcagcacacagcctggcacaaagtaggtgctcaattaatatgcattaattcatattaattatgaaagtcctgctgcttgagtctcgggtaggcaggcaggaaggccagcctcgcaaccttccttagcatcatccaaagtgcaaggcgggtctcacagaggctctgtcttccatgctggggcaggaggggaccacaccgtcatgaataccaggcacgtagtggaggtgacatgaagcctcaggtatcatgtacaaaaaccttctggccctgtggagctcactgccaggaagcagccctgcagccactcggagtacacaggcctgcgtacgccccacacggaggatgcaggtcccctgtcagtgccctcccagcctttcctgccagacccaccacacttgagtggcctggacgctccaatcaccccctctcccaccacacccaggcttcctacctgccaggcttcctacctaccttactatcactgtcccctgaccaaggcagacctcttcttctcatctctaagagatttcccataaagacccaagtgactggcttctcttggaaatctagaagccatggacaggaacagatggaggagcaagcatgatctcgactcaccagccccgccagcctgtacccatgcttcctcacctcccaggcagaacccccatcatcatcagaacctgcgatccctgcaccagcctcgcatccccatcccaccttggatcgcatgttcctaaccatggagaaggcctcaccttctcatctctgtctgccccagggtctcctgcctggagggaagccccaggaagggtgtacagaagaaccagatggcgacaccccctccatgtctgccacctccccacatctggcagagcacccctatttcatcttgggtacctgagttactgttcatacaccacccccgtggtttgtcccctatagtttattaacatccactaataaacagtgggcaggcctcccagggcgccaccaagagacccctggctgggtgggcagggccttccttgtcctgccctctctcaacacatttttcaccataagggaacaattaggaaaaactccctccaggttatatttaggaaggggtggaagtgggggaagcttcctctagtaattttcattcagttgcacaggactgcctgtccccacctacccctgggctagcactgcagggcaggcaaccgcctctccccacacacgggtgcaaaccaagcccagcctctgcccagccctgattatgcccgcgtttaaaaataagatgtgaaagatgcattatgtaagacctgtaacactctcctgcccacctccgactctagaatcaaagatcttcatttctgccatcaaaaaagaatgaaagaaaggcaggaacaatgaaaatagctgcccaacatgagccagatcaaagacatgggcacagaaaatgaggaaccaggggggcctttaattactgcctgcatcctccgagtcatgtggagagaggggagaagaaaagttttgaaggccaccaggttccgtcctgctgcggctcctgtttccacagccagcaccagttcccgacaaactcgtgcctttcatttccctcccttttttccctcctttttctctgccccccacatgtgagacaggactcccagactccccagtgcttgacgtcctccagcagagagagctcagaggggctccttggagaccccaagggagggacacggctgcatcttggaaggtcctggtgggtcccaacccatctgccctcccaaaaaacagccagagggcctccaggagggacccagggacccacagtgggagcgggtgctgcagaccacggtgcggttttttttttttttttcgcaagtctccctggttgagagggaaaaaaaaaaaaaaaactcttcaaattcacattgggcagggctccgtggggcagcagatcaaacctgaggcccggctgtttgagctcagcggcagaaaaaaggattgcccagggaccgagcttaagtagaagctggattaaacttcaaacacaaactcctcctttttctacacagcagacagtcatggctaatattgcaatatggactctaaaaatgcattacaaataacttactctggacccagacttgggtcttttgtatcaaggggaggagcaagagaaatcatttcaacagaaaagacataggagcccgccctcttgctccatagagggaagccgctggaggtttgggccagggaggccagcgagatccccgagtgacgggaaccttcaggaagatgtcttgctggcagcccgggcggctcccccggaggctgaatgaggcttaggtcttcctaagttgggagactctatgtatattttatcaaggaagaaatgccaggccaaggtgaccaaaacagcggtacatttcaaatgtctagtgacttaaataattaaagcatttacagcactcatgctcttaaaacacatccacaaacaatggaagatgattgtgttattcacgtgataaatgagagactcaataaaaaaggaaaacttacaaactcccgatgccagcaggcagtgtggtgggtggggagcagaagacagatttcaagctgtaggattggcttctttcagcacctccagttaccctgtggttggtgtcccatttctttgagaatggccacgctagtatccactccacggaagctcctgggccagtggctgtcctccagatactagcaagagcctagagctggaccaggagccacctgcactaccctggctcccgagacagcataccaggcacctcaggagatcttggccaggagcacagccacacaggtgaggatttggaggtttgggtgtagggatgagaaggatttgttcctactgatgtgttgattcatgtgtttacccggggcatgggtctaagattgtgttgtataataaagaatttggggctggacacagtggctcatgcctgtaatcccagcactttgggaggtcaatgcaggaggatggcttgagcccaggagttccagaccagcctgggcaacatggcaagaccccatctctacaaaaaaaaaaaaaaagatgggtgaggagaattagccaggcgtggtggtgcgtgcctgtggtcccagctgcccaggaggctgagtcaggaggatcgcttgaggggtcaaggttgcagtgggctatgatggcaccactgcactccagcctcggcgacagagagagagaccctgcctcaaaaagaaaaaaaaagaatttaggccaatatttgcaaagatatgctgctttcctgaagtattttcagaaacattaaaagcgtgccccacacctccgtgacctccaggaggtcgaggggtgtcacagtgtctgtgacggaacaaggatattgccctctccctacactccacaacacccagccagaggccaagaggccttgagagttactgcaagcaatcccgtgtggcaccccgggggccccaaaggcatggtacaccattgctggtatctccacacaactttaccaaggtcaggaacaggcaggtggtacctgaggaggcatccaggctggagatgcatctgggaggggtggctgtccttcccccgaccaaaaaaccaaggcagtcctccctcagaatggccacatctctggatctcacaagtcctgaaaggctcccaggcagtgacccagctctgccaccagatagctcaatagccaaggacactctcccaggtccactgaggatggtagcctggactgtttcactctgccccacctgccatccccaggaaaggcttcctctccacaccctactccacctccctgcacccccaggggtgtcctgttctacacaaaagggcacagaaccaccatctactaagtgcagcccagtgtacaaggcagtgtgccagcccttcatgcccattactgccctgaaccctcatcgccatgcaagagaggcttcagtggccccatttcacagaggggtaaactgtggctcacaaatacgttaactgctaaagactgtgggcagagaaaaaatgtgaacacagaactgtcaagatccaaatcactgggaggccgaggcaggaggatcacttggggccaggagtttgagaccagcctgagcaacatggtgagatcccacctctagaaaataaaaagccaaacatagtagtgcacacctggagtctgactacttgggaggctgaggcaagagaatcgctcatgctcaggatttgaggctgcaatgagctaagatcgtgccactgcacttcagcctggacaacagaccaaaactctatctctaaacaaaaaacaataataattcaatttatctgcttttcttttcatgatgtgacatcatctcccaggaattcttcagagcttccacccctattaataaatccccttgcagagaaagtactgaccagaggggttctggaggaggcagcgagggggtaccactgggttaccattggataaacaaatggattatccatgcccgacaggcggtgcctcctggaagccttattacaccctataggggcacacagagaggtacccccgagcgctcccaacaggagtcactggaggatgggagggggatggagacctggaaacaaggagatggcaggcccgggtggagtgtggcaggtagaaagaggctgcagctccagagacagccaggaggtcggtgagcaaactaaagcaacctgtttcaccagccgcaggcctggggagcgtgtggagacaggagaggtgagctccccggcagcccatggctccagcctgaggcccaggcatctgaccagagacactgatgacatccttctcagaagcagccgtcggagggggctgagcggcccttagtggggaagaatcagccgaccagggcagagggcccgacagagggagtcagacaggtagacatagagagtgggttcatctatcaaagccctcgccctcttggcaagttctgatcttcgaagtttccaacttgtagctagaaaagtggccaccttctatgccccctcccagttgggaggatgctggggtctgtgcaaatattcactctgtgggatggtacaacttggtgaccaagaacttgggctgtttgatcagaccggcatgggtttgcctccaagctccaacacatcctggctgggtgatcgtgagcaagttactgaacatctctgagcctcggtttcctcataggttaaaacagaggatcctcggccgggcgcagtggctcacgcctgtaatcccagcactctgggaggcctaggcgggcggatcacgagatcaggagatcgagaacatcctgggtaacatggtgaaaccccgtctctactaaacatacaaaaaattagctgggcatggtgatgggtgcctgtggtcccagctactcaggaggctgaggcaggagaatggcgtgaacctgggaggcaaagcttgcagtgagccgagatcgcaccactgcactccagcctgggcaacagagcgagactccatctcaagaaaaaaaaaaatagaggatcctcaacgttcacaagtaacagagatgttgagggtatagaagatggggtgggtggctgcacaagggaagcgccattatgcagtgactataagcctggggctgagcacttggcctcctcctgctgctgagggacagggcggctgtggccccctatccctacactgccccatttcttttcttattttgtttgtttgcttgtttgtttgtttattgagacagggtctctcgctctgtggcgcaggctggagtgcagtggtgcaatcgcggctcactgcaacctccacctcccaggctcaagagatcctctagcctcagccgccagagtagctgggtctacagatgaatgctaccatgcccagcttatttttgaattttttttgtcgagacaggcatctcactttgtgttgctcaggctcttctcaaactcctgggttcaagcgatcctcctgtctcagcctcccaaagtgctgggatgacaggggtgagccaccacacctgacctgccccatttcttatgcagagcacttgacatatgaggacttcttcccatgggctataagggggaaaacgatgaggctttctccttccccactcctctctggcagacccccagcacacagcccgatgcagagccaagaggtctgccccaggaaacaacccaaaaaaaccagagtgaagccaggcccaagaccccacccaaactgacgtgggacgagggactgaagtccgatcggtgttggacccaagaaccagcaccttaacccatgcctgacccccactgcctcctttcaccacgcagggtggagactgagaagcctgcagccgcctcgtccatcttgctaggaggcacagaagccaagggaacagccacacaggggaaagcttggagaaaggatgaggaggaggcaggggaagctacaatcctgggtggacacccctgaaggacaggcaaatgcccacccactcacaacatgctagacaaaaggccactttcgagtttttaacatatgcccacatctattctctctatgcagtctctctgcagaagacaatattgtctctagtgtttagatgagaggtgaagaataagcaaagatacctcttacatctccatgaaggcaagggctatttccttcacccctgtgtcctaagcttagcctagcactgtgccaggcacatagtaggtgcttaataaatgtttcttgaatgaacgagtgaaaagcaatcgtagaatgcctctgtgagttccacaagggcaaacattatgatgtattcacttgcttggatgagccatagagttcatgaataaatgtgtgaataaataaaaagagtgatagctaacattaagtgcttattacatgccaagcattgttctgagcactttaaattgattaacacatttacttctccctccggcttccccttcctacttccctcctttccattcatcaaatatctattaagcatctttattccctatgctaataataggggtccacagaaatgagcagggtgtgggaagaacccgtgagtatgaggtatatgctatcgttagttccattttacagatgaggaaactgaggctaagagaattaagttacctgcccaatgtcacacagtaagaaggatgcatacgtgggattagaacccacagtcaggctcctggtcctgtcttatgcgtgaataaggttcaaaggatgcttatcaatgaccgtggtgaaatgctccatgcttttcagcctggccagcatctatccctgcattctgtagaccagccctgtcttccttgagcaaacactccctacccgctatgtgattcaggtacttcaagcctggccaaatagcactgcaccctccagccacagtgattggcttaaggatgaatacatgaccaatccaggccaatcagcgtgaatcctgagacctcattacactacaggaaagagatgctctacctcagcaaggaggctatgagcttggggccaccggaggaagggggattaacttgccctcttttaggaagagcctggcagagaatgaagccaacaaaaacgaaagcagagacaagaacactagagagatgaactcctaaggatccggccaggcctgaaggtttatccttaagccagtttgagatgcgactctattccttgcaaatgaaagatgcctgcccaatactattattgttcagttcaacatccttctcttataaatgaaagctcagagcaggtcagtaacttagtcaagctcatagtcagtgtcaatgccaaggctagagccaagtctcacgaaaactcctctgccagtgcaacattcctcctcagtctgtctaacgaggttctccccatgccgtgatcatttctatggacccctattattaacataggaaataaggatgcttaatagatacttagtgaatggaaaggagggaagtaggaagggggagcaggagggagagggagggagactgaattcccagagatcaaaacctgttcttactcagcttggtatcaccaagtgcccagcacagtgcctgccatacagagacccctctaaaaataatcagatgtgtggcgggctgaatgcacagaacaaagcatgagtctttgctgtgccaagagaaacagagagggttccattaaatcccccaattgctaggggcactagcagtagaattggatttgtaaagctacacacatgattttgtgcctccagccctgaacacctttttggccacatggtaaaaacatcctgcctctgctcatctgcaagcagggattggaaatcatgccccccgcccctgtgctcagctgccttcaggggataccttttctttcccattcttaatacccccagacttctaagagtcaaatcccctatgccttcctctcctgcaacagacacaccacacatagaactccactggcctccaagggaaaggaagggaggccctgccctcctccatccaggaagggctctgatgccctctggccagggcaggcaccgccagccacactgagggtggaggattactcctaacagcatcttgaggtagggtagggagagccttgggaaatacttgtgagcatttccaacacacaaaatagggtctggtttcatgtgaagaaatgtctctctgcaactaagggaaaccaggcaaaatatgaccaagccttacaaatacttgtccacctagtgaagacgtgagagtgtggtcctcagaggcagcctctggctcccacatccatattccacttaccctgagacccacagccagtcccttcccctccctgggcttccattccccagttctgcaccgagcagctcaggcgaaggatccctcagcaaccttacaggttttggtttttgtttttgtttctgagacatagtctcactcttgcccaagctggagtgcggtggcgcgatctgggctcactgaagcctctgcctcacgggttcaagtgattcttgtgcctcaacctcccaagtagctggcattataggtatgcaccaccatacctggcttaatttttgtatttttattttattttattttgagacagagttttgctcttgttgcccaggctggagtgcaatggcacaatctcggctcaccgcaacctccacctcccaggttcaagtgattctcctgcctcagccttcccaagtagctgggattataggcatgcgccaccaagcccggctaattttgtatttttagtagagatggggtttctccatgtgggtcaggctggtctcgaactcccaacctcaggtgatccgcccacctcggcctcccaaagtgctgggattacaggcgttagccactgtacccagcaatttttgtatttttagtagaagcggagtttcgccatgttggccaagctggtatccaactcccgacctcaggtgatccacccacctcggcctcccaaagtgccaggattacaggcgtgagccaccgcgccaggccccttactggtttttattttgtttgttcataaagcaaaaagagtactcgctctggagcctggagagtgtggactggaatccagactagacaatttagtacaagaaggacaacagctactactgagtgcttgctctgtgccagccacactccaagctcttgcatacattattccaatgcatcctccctacaaccctgaggtgggtactattattatccccattttatagatgaggaaactgaggcacagagaccttcaggaaattcaccagagtcataaagtctgcaagtgctagggccagacgtgtgatctcagataggtttactcagcttctttgaccccagtggactcatccgtaaaatgggaacccatgcccaactctcactgttactgtgagaacccacaaagggaatgaagggagaaggcatggagccctggaactgttcttttcctttccttcctctcgcttgaatgacaaaggtcttcacgcctgctccccagcctcacaaagcaggtagaaaagtcattgcgatggtggggggtggggtagcaggctcagaattcagtgacaggcatcctcatacatggggtattattattgctgttattattgacatgaaaggctagaaggctctgatttaagtaattgggccacaccaagctctagctccaaacaaagaaagtgaaacaaggctaccagagaaggacctcataccaggggctccccatggtgccagattccaaaaacctgactccatcagccccgctctcaaggtgtttttctacctccagtggctttgggagaaggaggcccaggcccgccaggcctggctggcctctcccctagcccctttgaagtgcccagcatggggtgggctggaaggaaaaccctgggccacagaggctgtgacggcacctacccacccccacccggctacctccccctcattgtgcagcctgactgggcctttgttgccagagtcctggcgggggacagccagggacctggcctcattaagtgcctgacctcaggcaagccccccccacccagggtggaaggttaatgtggctgcccgccatgcaggcctgggcctccaggaggctcctcgaagggacaaaggaccagccccctgtctcctctccaggccccaaaacagctgccagcctgcagagcgctttcaggaggggggctggctttgatggctcagaagtcaccaggggggcctcctttccaaaccctccttcctcccaccctgtcaaggagacaaagctcacagggaatcgccggagggttgacgcaggaatgcagtccatcgtgggggaggaggctggctggtgacgggctggcccacacctttcttcgaccttccagaattccccagggctcaggaccttgcttccaagcaagactcatttcagccctcaccaaggtgggatggagtagacaggacaagtggtcagaataagtcagaagcctctcagtccctaacccaccaggtccttctgtcacctggtttctgggtacagaactgatgtcacctaaccagagatgggctgggagcagagcagctcccagaaagagagagaaggccaggaatcctgtgcaagggaacaagcacatgatgttttttaaaagtccctctggcttatcacatcaccttctaataggagggctcactccaaaatgctaattacctaccaagtaggctcctggagtccaagccaagcaccaggtagaaccacctagaaggccattcctgatcaattccctcatacaatttccagttatttggaggcctgcgtctcgtatgccagactgacacgcaggtttacagcacactgattttaatttcaaaagactctagggaaattttttggagtgttttatttgcttaagatcctggagcaaacacaggggctccctggggcacaacaggactggcccaggaagcagtaccctggaccgtgcagtgggatgggcaggagtgccagagttgtgcgttcacgcgtgtttctgcaagcaggtgtgtcccagcgtgtgcacgttgtcagtgacacaacaaaaggccagctgaaagccttacctacggtgcgggcaggcggcatgagcccgcggtgatgcgaatcagccttaaccagcccattgttggggagcaatgcctttcaagggacaaaaggcagagggggcaggaggatacacggggagaggcgggcacatctgtctgtggcatgaaccactgccccattacgccgcctttccccacagcagcatctgggggtgcgtgtgtgtgtgtgtgcagggaccagcccgactccacattgtcctgcccagccaggagatggagagtgcggcactcttacaaagacatcgattttcttccttcccttccagagcaagatcagatgagctcccggagtgacacgtccttaacttttcagtggggttttctttttctgacttgtttgtttgtaacatttttttttaaaccaggtctctaattgtgtcttttcttggctgcatctcctttgctcccgccccccgaagcaaggagggcatgtgctgattatctgagtgtgcagcctgctcacggggcatcctgggctctaagaatgccagggggttagaaactggggaggggtgggggaattaattgccaagaaaacacaaggctgtgctgcgactttgattccatcaattaccattatctttctccgcaggtccgccaaccatcccccgatccggccgtgtttaactttctttgccagtcgtgataccccgtcagatttctggcgctgccacgccgcccgcctgggctccttctgggctcttatcagcctctcccagtcagtctggcccgccacagctgttccaggccctcagcccctcactttatctgctcgcacagacctcggcctggcaagcggtgggcccggcgcctgctccacattccccaggaagccagctgggaacacagccgccctgctcccggaccctctgagagttcattaccagccagggtaccccagcccgtcagccaaggtgcgggccgcgctgccgagcccggccgccggagccgcctgcatcattaaaactccaaccttctgaagagaagaaagaacaaaaccacaaatttagattaataaagcatttgttgattctacagcaatttagcaggcctctaagaaacccaccagagacccgcggagctccagtaattttctgttatattatctttcttgtaaaatacttccccagacagagtccccaaaggggctcaaatatcactgtgactaaccaaaatcaatgtgcactcacctattgacatttttacatagtttttggatttagtatccagccgaaaacacaatcacctcctctgccaaggagccgacaggcacttagctagtcagctattagtgttacaaagggaaaaatggaagcacccaggggagctgggcgaggcggcactgacgtcagggggtaattgggtgtctgagagaaattgccagcggctggccggctcccccgggggccgcacaaagctgagctgtaactctaataaaggaaaggaaattctagaaaagggggctttgctacaaaggagcccaggcagacgccaaaaatagccctttggaaataaataaataaatgcggccaaaacatctagatctaaaaaataaaataaatcactgctccacggaagctttctggcctcgcctccctggacatctgtttgggggcgcaaaggctcctcccacaccgtcccccgccccctgcccccgttcttccctggaaccacatggattttgatgctggaaggaggtttgccatctgatttggcaaatagtatgtgttttcaaaagaatctaagtttgtcatgtcctctttcccagaggtggtatcttcattgtttactttggggctcacaaggaaaaggaatttctattgtccggcttttagttgttttgatgttttcagttttgatttgtttatttttgagtgctcttaccatgccatccccactggatgaaaattgaaggggctctggctgcctggttcaggcctccttaggaaaagtctgtgttcttgggaagtgggctaaatttttatcttacggctcttccacccactgaccctgaggccaagtgagggccaaagtctccaagagggaggaggacagaaaaatagtggaccccaccccacagcagctcccgagccagggccccaggccaggatatcagcctccctggggagtctgcagccctcagaagacaggggcgaggggctgggctagaagcagggtttcaaggccaaagaccctctgagacccagaggctgccaggaaatccaggcctccttgatcaggcagaagagggtggcttggggaaagagatggcaagaatgggattcccagggtcagattctatttcatcgctttgaaagaaaaaggaaaaagaggcccaggatttcaaaaaaaaaaaaaaaaaaaaaacaagaagaagaagaagaaaaaaagaaaaagaaaaaagcagaatgcactccaaccccaagctacttggaaattggtcggaacaaaggtcttcagctaaaaatgtcaaatcagcaccacagggctccctgccctctccgtctccaagcccctgctgaagcccacagggcctgctgggagcagaaaaggcccctcctgaggtctgctcatggcccacagccccacccatcatgacaccccaggaggcacagggcttcctgactggggcggaggggcagctggaatacagggggccgttcctttcctgatggaacatccaggattggcactggggaggaaaatcaggctggagaaaggaaagggatcctgcaactcacagcccagggaggggaagcaatgctcaggaacgcagccgccagcgccctggcaccaaatcacaaaccttgaatcaatgatgcaattgcttaattaatcagcctgctcggggtgggtgcagaggatctctgtgagcatctgacccaaccagctcctgatgggcaaacccccctccttgggccccctctgctgggcccacgggaccacagatggttgaacaccgtctgggagtctcaccaaggggggaaaatgtgagttcctgagtcccctgtgtgatccagtcactctggcagaaaggagggaggaggcaggagaaaggaggagggaggagggaagagggaggagggcagaggagggaggagaagggaggagggtcttatcagcaacttagaatttcttggccttggctgctgtaagttagctctctcaatgttattttcttgtcccagtcaatgagattgtaatagaaatagagaggcctcttttcagcaagctagtcagtgccagatttagaatgaaaaaaggcagcttaaattaaccctaaggcttaacatgtttaagtcttgtaacttttaaaaaaacagaaccaaaggtgagtgtgcaggtgatggaggctgagatgagtcacacgtggaagccggtatatgcacgtgtgcgtgcatgcgcacgtgtgtgtgtagggtgggggacaggaaggcacccctctgtcttttcaagacttcagcagcaaaatgcttgcaaaaaagtagcagccagccttgatatttcctacgctgatggccccaaccagcgacgaggatttgaaaccagttcgcacgggagattggaccatctccaaggttgattttctcatctttaatgtgcagaggggaggtgagaggaggagaggggaggggaggggagcaagtgggccaatatctcaaaccgaccccaaacggttaatgataatgagacggcagcgcgctacaggagcttaacagctctaaggaagaggggagacccaggagaggggcacggcagaggtgttttcaattaccaaaaagaaaaataatttatttttaaacaatacctcttcgacactgggtgtttaaagagaacatactctggcccctaaaatatcaaagtgagatttaaaaatagaaaagtcatttccccccttccccgttgcagattttactgtagcgttctagaaggcagattaaatgaaggaagctcaaacacactcaattttgtcctttagcaaattcttctctttcactcttgcatgaagaaaaaaaatctccccacagagtttttctcttcttcctggtgtggatctgggcccctgcagtgccctgtgtaatttccagttcctcagaattcaggtattaataaagaccccatggggacttccaacaatataaccctacattttgaggcattatgaaaggaaacccccaggggtctgtggctcaaatttctgaaatgtaggcattgtaaaaggcaccccaggggatgcccgcaatagaaatctgctgaattcaaagcattttggaagtcctggtgggagtcattactcccactggaagctttttacaaaacatgtgttgctgacatgttgacagattgctcagtgaagtgtttaggtgcatgcacaaggcgggcctttggagacgctcacactgccagcgagtctctgaacgctggaaccggtaccatccatatttcataacaggggaggccaaggcagccagggacgggagaagtgttctccaaatcagcagcgagcctcgcacccctctgccgaggagccacttcgagtgggccagccccatcctcgcctttggaagctggtttgtgcagcacagctgtgacggcccttgtatccctgccgagggctttactgaaggaatcttgaggcgacctcactgatcactgcaaggcgtcatgccgatcaaattgaggagggggcagggtggaggcggggggctggcgggcccctcacctccacccccagccctcaaggagaggctggatggcgggagggggtcagaacaaggggcacgcttggtcttgacagcattaagctcaagaaagtgatctgtgactttaataaggctgagaggctccgaggaattagctgcctaggtgatgggggccagagatggatggaaatgtattcatggcctggtgggccaagggccaggctggggccctggggaggctggctcacccacagccccacacgcttccaagctctcatctccaaaggagtttctcggccacagacccatgtgtgctggaggagcgagtgccaagccaacctgcctgtgtgcacacgcacacacacacacacacacacacacacacacacacacacactccatggcaggataaagcaccatatgctcatgttcataaaattttaaaggtaaaagcagatgtaatttgataaatgtgtacatgtgttgatacgaacacatgcaccaacacaggcgcgcaggcatgcacacgcccgcattccaatgctgggccctcctccctcctgggctctgcggttaccgctagaacctccccacaggtgcaccaggaccagagaggcgacctgcttaaccgtgtcatggccgctggaacacacaaagaaatctcctttagaaatttctttcttgaaaacatttattctttttgaactgtactctatccattacgtcagcttggggttttccttcattgaattttttttaaagcatgtgaaggagtaaaaatcatttctgacttcaatttaatttttaggcacaacggcatttagagtcagggatggggtgggggtttcccagggcagggtgcccatccacccagccctacatttttcagggactttacctgcaggctggaaatttactctggatctgggaccagaatcctatcctcaacctggtggcccttcctgtctttttcctcctttcaggagaaaattacatttcaatggacaaatggctcttcctagagaagggtgcaagattccactctcccaaggcccctcacagacttctagggacaaaggctccagagaggcacctagcaggggagccccatggggtcagcccagggaggcccagcaagggtggatccggctctgctgacttaatggattccttcccaccagctgtcctgggtgagaagctgctaaggcttctggagctggctggctcctaggtcgccctaactcgctgggctggcaggggttgtttatctcccagctcctctatgccccaccctgggttcaatgcatcaccagcttgtgcccagcccagtgcccggcacataagagatgaacaggagccctgtggtgagtgaagaggtgagtgaagcaactgatgagtgatgcgcccaggccataaataaaagccatttaagtctaccccagtagactccattcagtgcaagggaggaagggcaggtttccccttcagagtggacttcagagaaccctgttcttcaaagagggcctggaggcagaaagggatgactgagcccgggtctcagggatccactttccagagggcagtcttagcccctctggaacaccctggctgtgccatagccagagggggaacacaggagcaggggcataaagaactgaaaaggagaagggaagaatcttcgctagaacccccttctagggcatctcaactccactccatgacactccacgaaaactcccactaagcatgccacacctataacaggaaatccagaggtgacctccctcctctgggtccctcagtcctacccacagggctctgacacctttctccttggatgacagtaacccagtgaccaacttgtcccaatttgtctaggacttccccaattttagaactgaaaatgctacatacataccaggaagcccattagtcagtcagtcatgagcaaactgggatagctgtaccctcacccccaagactgtgagctctgtgagagcaggaaccagcatagagcctgatagagaggaagatgcagtgaacatttgcttactccatgcatgcatgcttgaataaatgaaggctttgttcccaggctccagtagatctggagggagtatgaaggtttgtgtctcatcacacacagaggacagaattccactcccatgtaactgctatgcagagcacacacacacaccagactcccaaacaccacagtgccacctcagctgcactgtgggccttcaaatatggctgccagagcttggaaccaggcatgaaaacttcccagctccaagggacctccacttccaactggagtctctcctgctcatcagcagccccaggccacctagaactccctgggctccctcctggcctggaagccacttacaaacctgtgccaacactgccacctccaggaggccaccctttgcacccactcctgcctagcccttccagcctctttgttgcccgagctattggcctgcacttttaaaggttaaatgacagcacggtgggctgtcctgtcttctttctgggaaaaaggtgggagggcacttgggatgggagaataagaaggccttaaatacaggcttatctggtacatcaggagacagatgtgaatgcaggagaattcattcattcaacagagtcaaggccccagcccttcacaaagcctgccatggtcacagcatggcaggtggatcactgggatggggagtgccctctgtctagctatagggcactgtaatacacacctgagcacaacctcacaatggaacagtataaagccgattaaaaggaggcttttggacaatattaatatgataagctgtttacaacctatgggtaaacaaaaacaaagcagattgcagaacaagaatgtggatggatgaatgccaaaatgactctctggatctctaggttataactggattttcttcttttcacttctctgtacttaatagaccttccacagtgagtttattttattttttgtgcgtgattttgagacagagtttcactcttgttgcccaggctagagtgcagtggtgcgatctaggctcactgcaacctctacctccctggttcaagcgattctcctgcctcagcctcccaagtagctgggattacaggtgcccaccaccacgccaggctaatctttgtctttttagtagagatggggtttcgccatgttggctgggctggtcttgaactcctgacctcaggtgacccacccaccttggcctcccaaagtgctgggattacaggcatgagccactgcgcccggccccacagtaagtttatatagcaagcataaaacaagaaaaatgtattttgagaaacaagggagtgtccaagtgctccattgcttctgggaaccccagagaaggcacgtggacgaccatctgtgtagaggtcaggaaaggcttccaggaagactggaaggatgggatggctttacagggaggcacactgcggggtggtgtttaacgcagagagaacagcgtgggcaagggcaccacacacttcaaaggcaagggtgaggtggggagtggtaagatagcctggaaaatagggccagacatgaccacaaatggccaccctaggaaaaaaaatgaattttggtctcatgggcactggaggctgtcagtcctcagaactgacccctcaccactccccatcaaaggtgaagccagtttgccttgaagaactagtttccatttaacaattggaccctccgtaagatgggcaggactgtagtcccaaaaggatagagccttcaagttctcacctccaggccagccatggccacagctgcctggccaatcagacagacacgctggaagaatcccatccctgggtaccagcattgaccctccagtcctgtgctctaaagggggctcactgccttgtggggaccagggcatgctgccccaccattcacaacagagccaggtgtgaactgggcccagggccactccaccgcctggaggcagacttccagccactggtgggatggctgccaccaaacacagaatccaggtgtcagaaggaaattaaaacaaatgaccctgccacattttttatcatccattcataaaaaatacaagagcaacatggaagaaaaataggtcacttcagtgagatttacagcaacttagagatctaaacatcacccgaaggtcttctgcctccatctggcttcaaaaggccaggtctgattgacccagaaacagaagagaaagtccagaacccagacaaagtgaggtaatggctccgggcaccaacaacacaagggcaccttcggcctcacatggcaggtggtcccaggacccatgactgccagccaggaaggagaaacctataaacaaacccccaggacaacccacacacctgcccatgctatccacagcagccagagggatctgttaaacacacacaccggatcctgtcacccttctgctgacctcttccaatggcttcccactaggcttggaataaaatccccacccctttccatggcctgcgaggcactatgtgatctggccccagccccatgccatgccctcacctcaccgctccctgggtacctacccccggggtccctgccggtaccccgacgccctgtgtcacctctgcttccccagggcctttgcacatgctctccccactgtctgcagtactctccccactaggctccacccacttacctcttgctcctctcagacccagggtcaagatgtggggagaacctatatacagaaaagagcatttgtcaggcatggtggctcacgcctgtaatcctagcactttgggaggccaaggcgggtggatcacctgaggtcagaagttaaagaccagcttggtcaacatcttgaaaccccgtctctaataaaaatgttaaaaaaaatagccaggtatggtggcaggcgcttgtaatcccagctactcgggaggctgaggcaggagaatcatttgaacccaggagggggaggttgtagtgagccgagaccacgccattgcactccagcctgggcgacagagtgagactgtctcaaaaaaaaaaaaaaaaacaaagagcactttccctactcataattcaaaataaaaaacactaaattataaaataactataaagaagccttgataaaatttacgtattatttacttatgcatcctctaatgctttaaaaaaaaatactagtgccctaagcacttccttgcagatttgcagatcttattttacttacttatttatttatttatttttttgagacagagtttagctctgtcacgcaggctaatgtgcaatggtgcgatcttggctcaccgcaacctccacctcccaggttcaagcgattctatgattcagccttaaaaaagaaggcgggctgggactgagctcatgagggcctgcagagtggagacttaaatccaaggtcagggcaaaacatctggagttcattgccaggactgtgatgttacagaaaaggaccgtgaaaggtgcgtgcgggacccaacacagaatcgtggccatgaatgggctcgctgaggacattcgacatcagcggtgccatgagaagccatgccaccagcaacaggggaaagctacggaacctgccggcagatctacagcatggagatggctccaaagatcaacctcttggtggaaaagaactggctggatcggcggagctgctgagcctgtggatacgacacccaccacttttttcttttcttttttttttcttttttgaggtagagtcttactctgcccccctggctagagtgtagcggcaagatctcagcccactgcaacctctgtctccagggttcaaccgcctcagcctccccagtagctgggattacaggtgtgtgccaccatgtccagctaattttttttgtatttttagtagagatgtggtttcaccatgttggccaggctggtctcaaactcctaacctcaagtgatctgcccgtctcggcttcccaaagtgctgagattacaggcatgagccaccatgccctgctcttccttgcagaacttagctccaactctaccacctcagggacccctccccgacatcctccactgcccacatgccacagggacccaacacgtgctacccgcacagcctttcacaggccatggatgtaccttcccctagaagcacttgcggaggctgtcattttcccactgcttgtctgattcttggactaatgtctgttccccccagcacaccctcagctccacagtgaggacaatgcctgcctcctcctgcttcagcacagggcatgggacctagtaggtgctcagtaaatatttgttgaatgaatgaatgaactaataaccccatgaatgaatgggcggggggtaaagattcacattacaaacttgctcttcagtgaaacagaaagatccatcactgagctcctgggaagagctgatttccctaaggaattcaaatagttatttcagcaaacatttacaagacacctactatgtaccaggccctgaggacataaggatgaacaagacaggccttatcctccagcagctcggcccagaaaagacaaacgcataaaaaactcaaacgttcagcagccgtttatatatatatatatgaaaacggagcttcggagccctgggggaaagccaaggaaacaaagctgacttcagaagcaccatcatttcctgcctcttgtctcccccaaccatccctcgaggtcaggacgctgctgttctcagcaggtgccaccctgctcggtgtaacagaggcacacaaatctgactcttccctgaagcaggggttcttcacaatgacatcatcttagtgcccgagaggctgccttttttcatggaagacacgtttatcaggttcctacaccacgccaggtacgatgccagccactccaggtatggaaacgagaccatggtccccgccctcaacaaggggtgcatctagttcagcagctctcagccaggggcagcaaccgcccttcaggagcatttttcaagtgccactgctatcgtctgaatgtttacgtccccccaaaatttgtatgttgaaacctaaccaagatgatggtattaagaagtggggcttttggcgggtgattaggtcatgagggttccatccctacgagtgcgatcagtttccttatcaaaaagccccaacatagcttattagtccctttttgcccttgcaccagagggcacatagaagtctccatctatgaggagtgggcccttaccagacacggaatctcctggcaccttgattttggacttcccagcctccaggactgtgaacgacaaatttctgttgcatgtaaatcacacaatcagtctcagatattttgttatagcagccagagcggactgaggcagccacaataatcagggaggttgctactggcatctagtgggcaatgccaaggatgctgaatgtcttgccaagcaaggaacagtcctcagaatgaagaattatgctccactacatgccacatgtagaacagttgaaactctagaacaaatctatcagcctaaaataaaccaacaaactctcccttgacttgcacacagttgctagagatagcgagccaaaagtacaaataacaataatgacaataatctatagtccgaagaggtgacctgctcgtcatgtctagttttggaccctaaaacacctcagctctcaccaaaattcttcttccacacttcccaggtcctccctgcctccatagttggcctatccttcctaaagtccttgctactccggtgtggttcagtagcatctgcatccccagggagtttgtaagaaatgtagactctccggcaccccaggtctgttcaaatggaactgcattttcataagattccaagtgatcataaggacctaaacgcctaagaagcactgcctgaagtcacttcagggccgactctggcactttctgctcaaaagtcaccaggcggcagaagtagtgagggagactccatccctgcatcctctccatccccggcatcctggtgagatggcacagcacctctgtgcagagcagccgggtgccactggaatgacaggtggctcttaatggtgggaaaacaagagaggggactccacaaaaagtcaaacaggtgtccagccttaaggaacccacctggggaagattctcatttaagctccataccagtcaagaggtgacaacacgtggcaatgctaaggaacactgtttaattcccgaggggcttgccagcctgagaggacccagaatgagtgtaaaatgaggttgcaatgtctccctcagcaccagacaacacctgtgccccacccccaggcttcacttggggacatggggctcagatccaagtcttatttcagggtttctctcccagctgcaccagaagctgccgggtaggcaggtactgactcccctctgtgggcccctcaagcacagtatgtaaagccaagttggtactagggtgacgactgtggaacggggtgagatgggatgggatgggacaggataggatggaatgagaggggtggaatgggatgagtagagcaggtgggataaaataagatgcaatggaacagaatgttggaatgaaggaaagagaaggttacagaggctgggcccaacgatgccccttctccttatcaaccatggaaaaaagtgttcctacagggagacgtgtacaagaatgtttactatagtgaacaactggaaacaccctaaataccccccaccaggggcctgctgcataaagcacggggcatccacactacgcaagccccacagcagctaataagaagtagggagatgtacccgctgaggtgagaagctctctgaggtctaatactaaatggaaaaaaagcaagttgcagaatgatagatccaatatggtatcattcattttttaatcaaaaatcaatataacattgtttctgtggatacacataacactatatttcactgaacgtaagacaccgtggatggtaaaatgcaccattattttacagaccactgaaaaagaaaaacaaaacccactgtcaattaaaccatgacaagccactagttgaaagatgcacctcaatttcagaaatgttaaaatgtgtcttagaatctatgaaatacagtattacgtaaaggtgtaggagaaggtctggaatcaagaaagccaaaatggtaataacagtagttaacaagggggtggggacagcctgaagcctatctttgaaatttttacaaacagaatacatttatggccagacgcagtagctcatgcctctaatcccaacactttgggaggctgaggcaggaggatggcttgagcccaggagttcaagagcagccctgggcaacacacggtgagacctcgtctctagaaaaaataaataaataatttaaaaattagccagaaatggggccacatgcctgcagtcccagacacctgggaggctgaggcaggagaatcgcttgagcccaggaggctgcagtgagctatgttcacaccactgtactccagcctgggcaacagagcgagaccctgtcgctatttaaaaaaataataataataaagaatacatttatgtattactgtgatatttgatcacatttaattgttttaaaataatgagggaaggccttctctgctcctcacttggaggcaaagtgatgctgataacataggggcctgcattggtcacagaaggaacgggcgcccgcactgctaatgcacggtggggctcgcgtgcctgagcaggtggggtgccgcaaagctttgtgaagaggagaaaaaaagctcttaggaatgtccagaggggaaagtgccattggaaaaaaaagaaacaatagaaagagaatttgatttcgggaaacaaacaattcataatccactgatagagggctactcaggggctgagggttggcccccaaaacagctccttcatctcccctcactgccctctgcaaaagcagtttggaaagtcataatgccatcctgaatgcatccctcgctagggacctcctcagactcaagcttctaattccaccttaatatccaattctgtgtgtcagggacggctgaacctcggcctgcagccgccacatcaccttgccctgcacacaaataaaaatagctttggtgctcagagcaccggttcccttgtcttatcctctgggggtcccgggagcggcgcgatccgcgagtggaaaccacgtgtgatggaaatacataatgaacaaagaggctccgcggatgcatccttgaccttcctgcttttccttgacctctccactgccattgtccctatgaagccacaaacagaatgacaccgtcgtgcaggtgacagccacagaatgccttccattgccaatttctccaggagttaagcagaaaatggatttaatcagaatgataactgattcatgtcgccatttatgcaaataaagttttggcagctcaggcctccatttgtacacctccacttgccaggcgctgggcctccagtctgacaaatctgctcctctgctccatcatctgtggccttacagagcaagaccaaagtgctggcaattggcttgtcccaggaaaagggaccaccaaaagctaaaagcccacagtcacctgacatagcctcagggtccaggagaaacagggcaccacccactcccccacacaaatcacacaggaaactgctataaactggggctgatctccaaaatctgacttctgagcatttgctcatccgcaggatctaagagagcccagggagtggggtgggtacaaaggatatttgccactgtcccctctagatccgcccccaccttggtccattcctgctctgtgttcctgcagcgactgcagtgggggaggagacagatttggggtagttattctcccagcctctgccctgccctgctgcacccctctccctcagcagcctccctacagccagtctctccaggtggcctaaatgcccctccccgcaccctggcaggttctcaggatgatgccccactcctggacagctccccttcttcccctgcccgcttctgcaaatgggccctttattaaatgctcctccatctcccggtttgagtgcgccatctgttttctgttgggaccctgaccaagggggtattctttaaagaatttttaagtaaatatgtctgcaaggtgtttgttgagactgtgataaaaaggcattcgaggaagcagtgtgaaagatgccatccgtgagactggagagacagaaagtcagtgatcagacacgcaggcccagagaatgtgggcgaagagggaatcttccagtaactcactcccccgctgccagggcccccatccctcccctgtgatctggctgtgtggagtcaatgaccagtggctttctccctgcaactccatcacgcctcccacagggcagacaagtcagcccggcagtgtggtaaaggaaggaggagagagtgaacccaccaggcacagttgcttctgaagcccagctctgggtctcttgcttaacgccccagcagtgcttctcaaatcccatccccaggagccggagcatcttcctgtgccctgcagacggctcattctcccaggagatcatgggctccgaagggcgggagccaattgtatttattcatcacctcacacatgatggtatgacggtatgacgaagcacccggtgcttacctccttattatctgtttccccaaccagggcagggatctggtctactcagggtgctgctatatttcaacacgcagccagggcctagtacatactaggagctaaattaaaaactgatggggccaggtgcggtggctcacacctgtaatcccagcactttgggaggccaaggtgagcagatcacctgaggtcacgagttcaagaccagcctggccaacatggcaaaaccccatctctactaaaaatacaaaaaattagccaggtgtctgtaatcccagctacttgggaggctgaagcaggaaaattgcttgagcccgggaggtggaggttgcagtgagccaagatctcgccactgcactccagcctgggagaaaaaaaaaaaaaactgatgaggccgggtgcaatggctcacacctgtaatcccaacactttgggaggctgagatgggtggattgcttgagttccagatcagcctaagcaacatagtgaaaccccatctctacaaaaaaaaaattaatttaaaaataaaaatgggtggtctgaaatatgaactgccccctccactgaagaccgaaatgcaccctggggtttgtcccgcggcccctgctctccagcccccaggaagccatgggaagagccatttctggaatgggaagggaggtgtgagttgggtgtggcttggtggaatttgaggaggggaaggcttctttccagtcccgaggagacggcccagctgcaagcccccaagaattcctggtgttcgtgccatccaagggaacaacttagcaccacccaggccacttccaacaaatcactgagtaagtattccctgagcatttactatgcaccaggtctgccacaaggccagagacaggaacaggcatgagggagacagcacaggacgggactcctaagagggtcaccttcgagtggcagagacaataattcaaaaacatcaagcaatcactgccataaaggaaataaatggtgtgatgtgtttggcgttgaagggagccgctgctgcaggagacgggggagggtgtcagcaaggagggccgcgctgaggaggtgaccttggagacacagaaggaagtgagagagctatccacgtgaaaagctgaaagaacacccggggaaggcaggtggtgcaaaggccctgcagtggaatgagcacggcctgttgacggctcaagaggaggaactgaggccgggcacggcagctggcacaagtatcccagtgctttgggaggccaaggcaggaggagtacttgaggccaggagtctgagactagcctgggtaacttaccaagaccacattttttcaaaattaatataaaatacttagctgggcatggtggtgtgcacccatagtcctagctactggggaggctgaggtgggaagatggcttgagcccaggagttcaaggctccagtgagcaacaatcgtgccagtgccctccagcctgggtgacagagtgagaccctgtctcccaacaacaaaagccagacacagtggctcacacctgtaatcccaatactttgagtagctgaggcaggaggaatttttgaggccaggagttcaagaccaacctgggcagcatagagagaccccatgtatgcaaaaaatcaaaaaagtagctgggcacagtggggcatggtggtgcaagcctatagtcccagctactcgggaggctgaggtggaaggattgcttgagcccaggaggtcgatgctgcagtgagctgtgataatcaagcaggaggaggagaagccgcaagaggcacagggccaggcaggggagtggattcatccccagggcagtgggggaggagcagagtcagatgcaagctgtcctgaggacagcggagggcagttgaggagaaaaggctgggtacaggctgggtgcccacaggcagatgccagccattgcccctcccaagtctccctgctgcctgcccctcagccaccttccttccacctacctcccacaacacaccccaccaaccctcagaggggtcagacccgctccagcagatctgacctcatcacccccatcatgaggcagcaccaacctgctcagccaagcccttggagaggctgagacactccatatccaagggcggggacagaggtgcaggtgtgctcccccaagctggctgccattcccccacctgcagagccacctcgcctgcctcagtcttcccacatgcaccctcatacccatgacgtcatttccaaaggcagccaaatcctagccagtcaactccaaaataaaactgtttaacacaaaatgaagcattttataatcccctgtacattttttctctgagttggcacagagtgtttaaaaacactgccaaaacactcaaccaatagtagcgctttattttagaccagtgccagagttaaatttccttgctcttttcctgttccgaatcccccgcctctccctgctccccggcttttgctgcgacactagaagcagttcctcctgatcgcccctctgagccactaggccagtgggctggggtgctggggaggctgtgaccagaggaaagtggaatccgcattacgggatgatctgctgggagcactccttgacctgcaagccccagtcagcgggagataaatttggttggtttctcattttgtttggggatgttctttatttttctgtattagggtgtcatgttagggatgtcaatcacaggatctcaaggtttgaaggaacctgataaatccacatgcccatctctcagccccaagcctgcatcccactctcctcccccgccaccctctgatgtgttcatctccaggcttgcaaagactctcaccaaccaaaacatcactccttacacataggccaggcaggtgtccctggggacttctggaattggtcctggtctggcccttggagtatcaacattaatggagaaaggggtggacaggtctcatccccactcccccactgccctggcacacagaggcatcttacccagaggcaataataaaagcatcagccactcaagccataccttcaccatcataggaacaggcccccatggaactggtagggctggctggacttccagccaagctcttgcctacccctcagttcaggaggtcaggtcacctgctgtctaggttaaatggcctcagctccttctctcttcaggctgcttctgcggccagcatccatccccacttcttctgctagcagcaccctgatttcctctggggaaacttttcaggtctgctattcagagcacttgacttgacctgagccaaaagccatcatggcattcctcagagccaggagatgcaggaagactgggtccttcgcccttcactggagtccctggattcagctgcacctgaagatagtcctacacctaggtttctatttacatgagccaatacattgcactgtttgatttcagctggttaggatttggttgtctgacactggtcggcagggaatcccaaccttccaacttgcaagcatgaccctgagatctctccttctctgtcctccctgaaccactccctccagcaacacacagaacagacactctttctgcttctgctgacatagcgtcagagcacagtaaataaccctttggcagtgaaccggctcctgttcttcatttccacaccactcatgcacacattggccagtactgaactactggactaccccacagagggaggggaccaaccaactcataggagtacattcaagaatcccctggccaaagttatcgaggggcccagtaagctacacaagggcaggaactgttgtctgttttgctcacccagtgctcacccagtgttttgctcacccagttcccagcacacagtagatgcttttaaaaaaagcctctgtggctgggtgtggtggctcacacctgtaatctcagtactttgggaggccaaggtgggaggatcacctgagtcatgagttcaagaccagcctggccaacatggtaaaaccccttcctactaaaaatacaaaaattagctgggtgtggtaatcccagctactcaggaggctgaggcaggagaattgcttgaaccaaggaggtggaggctgcagtgagccgagattatgccactgcactccagtctgggtgacagagtgatactctgtctcaaaaataaaagatctgtgaatgaacgcacacgtgccaggggatgctgtggttctaaggaacacacttctctttcatccgttaagtttgcttgttcctttgagtgcctggaattgtggagtaaggaatggaagaagagagcatcaacacttttcagctctgtcttaagtctgttcaggctcatataacaacaataccagaaactggatggcttctaaaccacaaatgtttattgctcacagttctggaggccgggaagtccaagatcaaggtgctgggagattctgtgtctggtgagggcgcatttctcatagacaacacagtcttgctgcgtcctcacatggtggaaggagctgggcagtcctctgggtccccttttgtaagagcactcatcccattcttccagagccttcatgacctaatcacctcctacaggcccactgcttaatactaccacattggggattagatttcaacaaacgaatttgggggaaaagcaaacattcagaccatagccagttataataaaggactcttctagaacaactcccctctatttgcctcttttaccccaaaatcaggtcaggatcccagctggaggctattcctatcctcacccacaggcatttctcaaagcttttgcaaacctcaaattggtagtaaccgagattgattactcagggaacacaattttcagatctttatgcccaacagaatccagaattagcacaagcacctccaggagaaaggcagcagggcctctctggggggctctggcctttgcttttcccgcccaggggtgagacagaggataaggagggcaggaagtgccggcctaatgaaaaagcagacctgacgggaaaggaagagcagctccacgtgacgggccctgagctggctcagtgacactgaggttttagagctatacactaatacactgggggaaaaaacttattattgaaatatctacagaataaagaaaagaccttgttagtgcaattttagaatacgtagctgcatccctctttctccctctggctgatggcaaatgatgtggttttttggtaacacttgggtgatatagtctggctctgtgtccccacccaaatctcatgtggaattgtaattcccagtgttggggaaggggcctggtgagaggtgattagatcatgggggcagatttcccccttgctgtgctggtgatgagtgagtctcacaagatgtggttgtttaaaagtgtgtggcacctccccctcaccctatctctcctgattcaccatgctatgatgtccttgctaccccttcaccttccgccatgatcgtaagtttcctgaggcctcccagccatgctgcctgtacagcctgaggaaatgcaagtcaattaaaaacctcttttcttcatcaattacccagtctcaggtagttctttatagcagtgtgaaaatgaactaatatactgggtttctcaggaacgcacgagagaggttcagcatagctggctgatttcagagttgcctctcaacaccatctgggcacctgagccactcaggctcaaggctccgactaacttggtggctgcccagcctctctccagcctggcctgagacctgaacataatattgtaggggccaagccgctggtggatgccacgagggcttgacacaccattaccccaccttccacctcccagagcactgcccccaaaggaccaagcagcagaggttcagggggaccatggctttatggaacacccaaggtgggggcacaacttctatgaagtttgttagaattcaagggtcaaagtcactcttccacaagatgcaaacaaagaaaaggtccagtgcaaacagtgtgaggtccgtgggtctggagacctcaaagacagtgagctcgatgtggcattcccagaagcacccatgagccaggcaggagctgcatatacacgggcacctcctgccagaaaacatgggtgccctgcaggctgcactagtcccctgtccaccctgggagctgcaatcccaccccccaccagcagttagcagataacctcagagagtgctggctaagctaccacctccctgtgtgacctgggacaagtactacctcactaaggagcctggtccagtcagtgccctggctgtgtttgagagactggttctgccattgtttcaaccacattcaaaccaaaaaaggtttgaggatatacacaccaaggattctgcttccctaaaattctaagattacctgactagacactgtcaaaagcaaaagtattggttatcaattgataactgatacctgacaatctggcatttcattgcactcttttactacttcctgtttgtctgcatgtaattcctacctcctaaagaagatgtctgtggctcctgaccaccattcaggggagcccctccccagctctcaggcccagtggtctgcatggagctgccctgattccccgcacccaaccctgacccttgctaacatgtatgttgtctccctggccgcatcatgggcgggggtgagtcttggtcctggccattctacagagtcaacctcaggacttctaccctggcaatggtaagaggctgctcattccattgtcactgctgagtcgaaaaggtggagcctggaggtgctggggcacctctgctgatgtacacacggtgatggggttcatgtcaacagacatggggcagtgtctctggaggccctggaggaccaagcttgaggccagccttacatctgcatttctcagttcctggagccaatgaatcctctattttctgcttgtcaatttgagccaagtctctatgcagatagcacattaactgaggaccaactatgtgctggcagccaaaaggatcacagcaacttcatcctccagctagactatacatttcccttaacgggaatgaatgaacacccatgcacaggcattcacggccccgaatacacagcaggtatggtatcactgcttgctgacaggtgccctctggaaactcccaagatgaaatggacaacagcaggctggacccagaccacaccgggaacacatgtacaaccagcctaaaggccagtttggtgtacatcctgggcccaggaggacaccggaagctttggctgctgccaggaaggtaacagaaaccggggacagcccacctcgctccccaagaaccatctccagaatcaacccccaggctcatcccaggggctttgtacagcagcaacacccatcgtgccaggcgccacactggatcccactctggcgcacccttggaaaccaaagaatccaagaagctcaattattcagaaaatcatgaaggtggtcaagcaggctgggtaggaaagaagcaaaaacctcctccactttggagagtcctcaaaacctccagaaagacacatagactgtagacacatagacacggtctatgccttttttcccatggaaaacacaagaaatgcagaatcttcccaccttgacccctgccttctatattgttaatttgtcatccaattttggggaggtttacaggcccaacagtgtgataacagcattcgctctatgtaatcaagtcaagggagggatgctctgcaacctgcggacttcgcaggcggtgaataaaaatgtcagcaactaagaaacaagtccccaccaccaccacattaccaccaggaaggaacccaagacacagctgtctgagccaagactcagaaccaccgtctatgcagcctgctggttccccagcttactccggatggttccccatcagaagccatcggagggcagggggcaggcaatttagggaaggcttccacaaatgccaccagccaagcagacccaggctggccggtggtccaccctgcccatccacttccctcccaagtggaagcctgctagcaggtcagcatcttcctgagagctatagagaataacgtctctgttcatcaaagcccctcttaaggacactagagaaggaggctgtttaaagaccaccacagcacttcatcacacaagtcaaagcatccttttgtgaagtgaacaccttctccactgagctaccttttataatagcctccacatccctagagcccagagggtccctgctaatagcacacactaaagaaacacttattgtatgaacgaaccatctcttccatctctaaacttacccttctgattatacattaattgaggacctactatgtccagaacttctgttttttctatctcatatcccaaagcactgtatccatggcatttccacttttcttactgcacacacccctttgccttgcaggagggctgtagcctccttagccccaagaacaaacattccttgagcacctactatgtgttctagccacaggccaaagcaatcctgcggagagggaagagaataagaccccaagcctggacatcatggaacacaacctgaccagtgagatggtgttggcaaactttttgatctgtgccattctggtatttttaaaatggtatttccttatggtttaaatttgcagttcccttactataaacggggttctaattttttttttttttttttttgagactgagtgtcactctgtcgcccaggctggaatgcagtggtgtgatctcggctcactgcaagctccgcctcctgggttcatgccattctcctgcctcagcctcccgagtagctgggactacaggcacccgccaccacgcccggctaattttttgtattttcagtagagacggggtttcactgtgttagccaggatggtttcaatctcctgacctcgtgatccgcctgcctcggcctcccaataaatattttttaaatatttaggatcccactagtatttctttctctggttccatttctgtccatttctgtagtttgcacatgggagatattcaaaacatctaaccaccagtgtggcaccaatggatcagagacggtacagaccttggggaaggccaggcatctcaagcaggcttggctgtgcctcaacctagcctttgccatgtttttttgtgttgatttattggctattttcttagcatttgtaggagttccttacacattaaggaaaacatcttttgcctgtgatatgtgtccctggcttgatttactgtggttttcacaatgtagaatttttttatttttatgtagttgaatgttttgactttggttttatggcttctgacactggggttatatttagaaaggccttcctcactctgatactattgaattaaaatatttaaaagctctctgttttcttttagtattttaaagttttctttttatgtttagattcctgatccacttgggattgagtttggtgtcaggagtgagggaaggatccaatttcctttttgggggatggccaccttttcatcctaatcccagttgctgagagagccatctgtcctccactgtcgtgcagggacacccttctcatacactagatttccagttgtatttgggtccatttctgtttcacaccacttcgaatcctttccgctccagagcaatctgagctggttcctgtccccactccctgttccttttccagaagattccttctgatgcctgcatacccactatttcttatgaactataaattcagcacatccatttctaaacaaatcttaccattgctttcattagctaacattaagccaataggttcgtttggaggaaattggcatatttatgatactgaatctttccacaagaataagagtaaggtctcttctgtgttccctgtcttccccccaccataattgattttgtttgtctgtcctctccatgccgtttgaatgtttcttactgggtttgctccctggtttttatacattttgtggctgacataacgggaccatttcttgctctgtgtttcctaactggaagctgtctgcatgcaggaaaactcttaagatagggggcggatatcaattgtgctcaagcccctagccttttgcgccatgtgaagtcaactgacaccaaggccccgagtgcattccctgtgggcagaaggagcccacacccagcacctgtgtatcaggtagcacagtgtctggcactggccccagccccacactgcacgaccaaaacagagccagttcgaggagcgccgcaagtcagtaaggcagggagcccctcatgcttttggagcaagaaaggggcctgagccagcacaaaaaggcaagcgctggccagccggccgacagcacacggctggcaaaggtgccagctccacacagcaccagccctgtaattggggcccacaggtcactctggccacagctgaacaaaccagggtgtaattaactttccacccggcttgttgcacagcagcatttcaccttcgccagaaaaggagggcctacctttcacaggggccagggaaacactctttggtcccagtcctcaagaagggatagcggagaggggagccgcaaaattaacccaccaggaacacattttttgctgttgctatttcaacaaagtcccccctcttgtttttttggaagttgagcattcaaaaaagccatctggagtttagtttgaaattgctcacagtccccaatctgtgttctcaagcacaggcaagctgttccgacctcagagcttgcctttactgacacgatctgtaaccttgagcaaggtcctccagctctctgagcctcagtcacccaattgcaaaatgaggacgaatggtagaaaatagtgcctagctttgggaggcccaggcaggaggattgcctgaggccaggaggtcatgatcaacctaggcaacatagcaagacctcatccatacaagaaaaaattaaaaatgagccaggtatggtggggcatgcctgtggtcctagctcaggaggctgaggcgggaggatcgcttgagcacaggaagtcgaggctgcagtgagctacaaatggcaccactgcactccaggctgggcaacagaacaagaccctgtctcttaaaaaactaattaattaaaaaaaatgaagacagcgtcaccttggacaccaaaggtgattgttataaagactaggtgagatgattcattcattcaacaaacatgttgaattctactctagcgctgggctagaacataacggggaacaaaacaggtatggctgttgtcctcatgcagcttaatagtagggagagagatgggtgagaaacacgtgaaagacaattacagaaagggatgggtgctctggactgtgtgggcgtgggggctgcagagggccagcagggagggctgcagggcgtgtgttccaggcagagtcccatagtgcctcgcgggcagtaggcactgaaaacacaaagaatatcaggactacagccttcactgcagtgtggaggaggcaacacctgctcacacatttgcccccagcaccagactgccagcccctggagggcagcacgcaccccatctgcttcagagccacctctctagggcccgccaggagcctggcccaactcagagatcagggaacggagctgaagggaagacaccaatgctgagctccaaactggtcctgaaggcgatttctattccaaggcaagtgcctggagcccgcagtcttactacctacaacaaaaagccatatatcaggccagcagcccctttagcaaagaggccaaagaccccaaaagctgtcaagtgctccagccccggggacctgggctggcatgttccaggactggcacagcacaggcccctgctgacagcccactgtggacactctgaggaacagcactaggaaagtcaggtctcaagcatgacagcgcagacggagcacccacacgccctccagctgccagcctcttaattcaggccaaagcaggggtcaacataaattgcagtatctctaaaagggagtatttgcaccaggaagtgaaaaatccagactacaggcccacaggtgactggcttcagtgagcacataaaaaaccaccatcaccccatgggcaaaccaaacctctcgcacctgcttctatggtaccccaggcagttcctagagaaactttctaaagcagtccaagtcctcctggctcctagaagatgatgataaacaccccctgctgcagtttaaaggacccaaatttgcttggccagcgcttcacaaattatgacgttatttgttccaacatgatttaaatcagtgagacctgaattgacagggactgcccatccttggcaattcagacagccaccaaatcctttgccatttcctgacttggtgcccacaaacaatgtctccattaggaacagagaagcccatcacacttacccagtcagcccctatctacactgtggcaaaaagcctcatctacagacatcttagtctaaatttaatattttcagagtatggacacagtacctgcaacccaagcttcctgcccttgagcactgctatttaaaagacagagttccccctagcaaaaaaaaaaaaaaaaaaaaaaaaaaatggcgaagaccaggtaaccacatgggaaccccttcataacatgttatgtgacaaacacagaacgtgaaaacgtatgtgctcacaaccccaagcatgcgaacgtgtggcatcctgtggccaggggctggagaggaacaaagaaaaatcaaacagacatcagggcgggagaatgaatggagaggactggatttttgctcttttcagtttgtgtcataaaaatgcaatgtttgatacctcatgggtttaaggttggtttctcctcagacacaaatgagagcgagagggagagagaggaacaggacttgatggagttgtccgagaccttaaagtccacgcttcaacagctcatgggcccggcatgccactcctgctgaggacaacagagaggtgccttctcgagctcccaactggaaatgaaggctccttagcacagaggccgggctccaggttggggacgggggggtcttccatcgtggccattctggcatgaagctcccctcccacccctgaggggtaagcatccccccacctcagaaaacccccaaacctcaccacagcactgtcccagattctgagggagcaaaacgctgcccccaatctccccctcaacaccaccccaactgccatagaaagatacagaagcagttttcaggaagagccacattcacggtcaccgcccacaaatacacccccgacaccccaacacacagcactctccccagaaggccaatggcttgcaagggctgaccctgccaggacacacccgtttggggaggcacgtgctgcctccacgttccagcagcaacagtccctatgaaggggagggttgttcacaccccaggtcacgattcctgagaagcaggccctctgctccaggccaagtgggcagaccctctggttcctacagaaacatctgcagggcaccatggtctgcccagcctgcgcccagcgcggccctctcggacacggtctctattgggcttctatcgagtgaccagtggtgagagtccagcagacccatcagcctggccagggggagcctgcgattgcacatttatatcagttccaaacctttaaatcagaggccaattttcaaacaacatcatctgctaaagccccaggtataaaacagacttttaaggtgaatcgctccgactggactggacatcagtgccccctcagtctgacaggccccagtactcacttcctacaccccaaacacaccacaccatagccccagagatacctctgggaacacagttcgaaaaccactgcacaatggaagggtgtggaggcattccaggtagggaactgttttgaataatacatacgcaattcccggtggtttatcccatcattgagtaatcctaagaaccgaagacctgggggaaagtaactcctcacacatctaggaaactatcccaggctgggtcatgcctttaccaggcggtaatgaatttctcagggatgcgcttaggcaaggttgtttccctcattctttcaaggaatttctgactcccttccaatgctccaggatttgggggtattcctagctcctgcgtccccacggaggtcattagcagggtcctgttaggaagcgggcaggagtgtcggtggataccaccagcatcaataaggacagctggggaccctgcaaacagggctgccatggatttcacctggagtcaaaggctgatgagagaagggtttgccactgggaggaggattcttcctggggaccaaagcacaattagctaccagttcttatttctggctcagactctcacatatagcccagtttcccagtttcctttttccacctagaagtgccaccattcttttatttatttatttattttccttttttgagatggggtctcgctctgtcacccaggccagagtgcagtggcatgatcttggctcaccgcaacctccatctcccgggttcaagcgattcttttgcctcagcctcccaagtagctgggactacaggcatgtgccatcacgcctgggtaatttttgtatttttagtagacatggggttttaccatattggccaggctggtcttggactgctgacatcgtgatccgcctgcctcagcctcccaaaatgctgggattacaggcatgagccatcgtgcccagcccgaaatgccaccattcttaaaagtgagactgaaagacaggagaatctccttgatttgaagggctggaggaaggggcagcctctaagagctgcagggactcaagaaagcacagcttagcagaaggtgtggggccctgctctaacaactacacagaatggcctattctcttgcatttagaaaataaagagaataacttttcattagatcaattagttgattataaagtaagtggcaatattttattctcttatagttaagattccatgttaattcttggctaaatcaagaaatataccaacatctataatattattcctcaagtaggatgagggtcaatagctcagtgtccagaggaggtcctagcttggccaccaaacagatatgtgaccccggccaagcaatcaccttttcctccctttgccctagtatttcccttggggaagtgaggagacttaaaaagctaacctcataggtcccttctaattctgatttagaattgaaaattaaccatcacctctgcctctggttgcaatatcacaaattccaaatgactggggtttggattactgggccccaaaatgtccaaaactgtaagattcctcttaggtctattattattattattattattattattattattattattattattttaaaaatatctgttcctccagaggttgagaatgggaacttggtctagccagccctgtgcaggcacagatgtcactagagggcaaatcatagcagttccccaaacacttaatttcaaaattccaagatgatatgaggagtagaaaaagcaagagctttgggtgccaatctaatccctaccagtaaatgttcccctcaacaagtgatgggttccctttagaatgcaggcctgagatttcaggctttcttccacaaaccagtatccaaggagcttcatcaacaaccctgatggaagaaggtctctcaggaagactgtgtaaggaacacaggtcctatggactccctctgcagatctcagagcccagaaatgtgtcatccctgtagcatggcttccacatcccagggaatgcacatgccctctgactccccaccccaatcaccccagacaaatacacatatacacacaaaactcctgaagtcttcagtagctcctagaaaactggtcttacacaccctctccaaggcaccaagtaaatggagaacagagctccagtcaaatctagcagaagcagctcccagctacccttctcctcctactcagagaagtgtgaggtcaagcacagagttggaaacaggtccctttttcacgggctgtccttggcctttgaaatttcctcatcccatcagaagctctgcctcggagcttactcctttatgcagctttccacacttaagctgcttaactttgcactaacaacctcttaattactgcgtttccaaaaggccttccagaaattcagggtgcacatccacccattcatggcctgagtaccagagcacagcttgcggggagagggggccgggacagagcaccaccatctaattcctgcctgccggaaagctgttgcttttatttttaattgtatttaaaaggcggatacagggtacccaagacaccacaataaaatgacattaactgtaaaattacattattaattctttaatctcacttgaggcttcaagctgttgctatgtccaattacccgtgtaaccacctgtcagagtcctggggctgttttgcattacctccaggacagcggtgggcccggtggtccgtcaggtctgccagagactcgaagtcctgctgacagtgatcgcaggtgtaaattgattcatcctccatgtcttcatcatcctcatttctctcctcttgacttgtcacgctgttcctgtcttccagcgcacggctggttttctgatcgcactctggctctccttctaggcctcctgccaacaggaagaatacagtccatgtcagctgatggggtcttgggaaagggttttaaaagaatcgcccggcatttattaagatacatttaattactctacctcccggggtccattatccttgacacctctcagtatattaatagatggggtttttttgtagcatgtggtgccataattctcaaccagattctttaattcttggtgcaaatcttctagggggatttcctgtcatctcccctctgtgcacggatgctgggggccgtgacccatcggagaggtgaaaaaccttatttgtctcctaaaaaccagattcagttacacacctttttaaagcctccatcagctgttcctaacacacctaaacttttagttttccccacagccttgcaatttagagctgggagatctcttagccaagttcgccttccacacaacaggcctcccagggcagtgacgttggctcagttctttgcaaagatgtccaactctgaaataaaggaagtacacatgtttgaagaaccatggatggtcgaatctcaagcttaaaatgcatccaggctgggcatggaatctcacacctataatcctagcactctgagagaccaaggtgggaaaattgctgaaggcctggagtttgagaccggcctgggcaatatagcaagactctatctctacaaaaaaaaaaaaatttttttttaattagcctggtatagtggtgtgtgcctgtagttctacctactcaggaggattgctagagaccaggagttcgaggttacggggaactatgatcgtgccactgtactccagcctgggcctggaccctatctctaaaaaatataaaataaaataaatagtgtcacctgtgacctggtacaggcctagacagttagaatcagtcgtggaatgatctcactgatttctttaaaataaaacagctactgtgcttagcactgtgcagagagtggctaatctatagggaaaagtgaattcgtaatcataatgatgccttgcaattgtgctgtgttccgtgcttcttcaaagccaccattatatatgcacagccccatttcacagtcttgcatatcctaaactcaaagaaggctcaaaggatcatgtgatccaaccccctgcagagagggacagctttgtctcacaggtaaggtacctggcatccaaccagaagaagcaacagcccaagcaccctacagaggctcagctcaacttcgtgactcctggtctagttcacttccctgcacaactgtgggtaatggagcacagccccaatcttacagattaataagacacaccaggaacttgtaaatcaaagtgcaaaagcgtgtggtaaatataacccacagaatatatcagtaatcctaataaatgtcaatggataaaatttgtgtgttaaaatgcagagaccctcggattggaaaataaaagtgtgtgttgtctcttcccacagcctgtcctggaaaacagatttacccatccggaaactagctgcactgatttaaatcaaagaaagagatcttattatccataaaggtgtttttgaaagcatatgtacatatgcaaaagtgcgtgtatgtgcacctgtatgtacatgtgtgtacatgcaacatcacagttacaggaaaaggctcagtgcacaacctgcaaacccctgagggcgggcgccaaagcaagaaagacagacacgaagcaaagaatgcactcaattcaaggtggaaaccacagtcctgtgaatatttcaatttggaaacagataatgttataagggctctatttctcctgtctgcacagaacatgcccttccaagcacccgacatcaagaacctgggaacacaaatcggctcatcggagagccagctgcttccttccaaggcggggaacgttgcacgacacgccgcctggaactgcgcggaggcagtaaaaatcaatgtttccatttgtggcccatcaaaacatctctcttcttaccaattaagggatgtacagtttttaggttcttttattatcagaacgcgccaactcctggcaatacagaaatcccattaaaagtcaggcagcatatttatctcagggaatctgatctgccgctgcagtgagggtaagaaatagaaagcaaagaaatgagaaatatcatttggagccttcgatattgtaagtcatcatacaaccatggttacacagtcaagtgcccgtctccgaaattcctcgtttacagtctttccttaataaaaaaaaaatgttctgtagaaagggaaaataaaagagccataattctggctttatctactacaccgaccctccagataataagttacaatcagcaccacacttgtgctactttacttaacacacaatttaatagacatatttaaattatcccctcgttatttttttgccgtatttacttggcagcactttctataatagctcatctaatccacaactggaaccacaaacatcacaatgtatttgatctctttaaatctggtacatcctgttgactcgggagtagataaatcagaatgtcaactctcaggtttttataaggcaaaaacccataaagtcatccaagagtataaatctgttttaagcaactgtcacctcccctatggccggctactaatgggaagggagggtggctgtgcagaaagggatggagacgaaggcgagctcaggccacacaaaggcgcggacctcatcctctgggctcccaaggggtcccagcctggccctcagggaggtgacacaagacagggaagactcaggggcctgaagaagttttggggagtgggacttccctgaagacccaagggcccctctgctgattcagcagaatcaggcgctggagaacaggaaggcctccaccccaggcagggtttgcctcttgcaatgcactttcatgcccaggagtttctgaacctcaccataagacaaaagaataaatggtgttatttttccatttgcagatgagaaaactgagcctctgcaaggccacccaaagccatgccaggatcgaatctacacgttcacgtgttcattaagcagcacacctttcctgaagtccctgggcctgttggagccccaagctctccaaggcccaggaggcagaagttctaacaacagggagctccaaggacatcagacctacctggagaccgtctggggttcctcttttccaggcccacctgatcggttgctcagtaagtcctggggatggaatgattggaccttccctactccttcaacccagctccgcctgtcctgtgtgctgctctgtccagccccagaggcccctcaactggtccctgtcctgagtctggacatcacctgtgcaaactcagagaacatagggcccagaggcccagcacctggccctgccttgtgagtcccatcacaagcgctggctcatttcaatgacctgggctagaactgcagctcactggttcctccaatcaccccagagcccagtgaagcaacttcaacaggccgaggagaaggccaatggctcaatgcttttctgcagaggcctccagggctggggagggcttcccgaaaacagccggctggctcctttccctctggctcctcccctgtcctcctgggggctgtctgcagcagcatgaagacagctcgctcagggaaggcccgagccaaatggatttcaaatcagggacctctccctcagggccatgtgcatgggacagaaaccgaaccagtgctgtgaacgccgacctgtccgtccagctgacaagattccctacctcccagagctcatgctttccacgatggacaactgttttctgatgtgcacacctgcatccttttgcccaggcatgccccaagaacagtgagcattgattaagcactcaatgcttaatcaagtgcaggcaccttatgagttgatgtcatcatatccccattttacaggtgaggaaagcagagctctgggaagtgacagagcttaagtgaggccacagagaagtggtggggctgagtttcaagcccactgcatgtgactcttaaccactctactacatggtttcctcacagtaagacgcaatgaacacctgagccaggtgttgggagtttgtaaaacccctcaaagtcccatgtagggtcctggtcacagcccctaaggttcagcaacggctctgctgatctctctcacttatcgcccatctccacagccttgaaggtcatctttcaaccccataaacttccaagtctctttggtccagggcttcccactcctgatctccagcaggaagatttccgttaagtcttcacacagttcccaaagatctccaccagcctgggcacctacggaagttggggccccattactctttccccagggctctcttccctttgcagtcagagctctcagcatcacgtgcactcatgcttttgtgggctaatttgtctactttctctctcccttggcaggctgcattttccacagactgccacagcaatatctcccaccccacctgcccttctgcagggagaccttgactccctcatcataacgagggaccgaattctcctccacagtccccctcggggctggccagactcagtggctccttgaccaacaggatgcaacagaagtgctattctagacttctgaggctaggtcagaaggaggcttgcagcttccccctgcatctcctgggacactcccccttcaagcccagcagccataatatatgaagcccaagccacatggagagagagcacataggggctccagtcaacagctcccagcttccagcaccgacttcagccatgggagcacaccatcttggacatcccaccccaagaagcctttggatgacagcagctccaaacaccatgcggctgcaactgtacaagaaacacccagtgagactgccagctgaacccagttagctcatagtactgtgagaagtagtaataaattattgcttcaggccattacattttgggatggtttgttacgtagcaatggatagccgaccttctcgccccacaccggactataagctccatgagggcaggagctgtgtctaatttagctcagtgccacctcccccaaccctggcatacagagggacatatagtaggggctcaataaatgttgaatgaatggatgagtgaattaattgattggtttcaaaaaagcaggcctctgaatccccacacaggtagaggcagaaggaggggaaggggccacagtgcagtttattgtctgacgataagtattagattgaatcatataaaggtgccattttttaggtcaaaaaagttgaatattggcaatctcaaatggctcagcctcacatatgacgaggttgccctgtcctgccagcttcttcctgcagccaggaggaagagggtacacccacaccaggaaaccccactacaccacacccacccaaacccagcttccctgaacccaagatatggacttgggggacattctatgagcaaagagaggcaataacaaaacctttcacctcaatcatgtttcgctggaaagcactgaattttcaggccagtcacaatggcttacgcctgtaatcctagcactttaggaggatgagacaggagaacctatggagtttgagaccagcccaggcaacacagtgagaccccatctttacaaaaattttaaaaatcagccaggcatggtggtgcacgcctgtggtcctagctacttgagaggctgaagcaggaggatcgtttcagcccaggagttggaggctgcagtgagccgtgttcgcaccactgcactccagcctggataacagagcaagagtctcaaaaaataaagtaaaagtagtgaattttcccacctcactgagctactgcccttaagaaagggcttgcattcaagatgatgacgttgagagcagacagcggaccctgcagaaacgctgtgcagcaagacagatggccccatgccctctagagggaaggagcagcagaggccttgccagggacagagggccttgccagggacagagggaggtggcacagcctcccctacaccctgaggggagctgagtatggtgtgagcatctcctggtaccattttacactcacactgccccatttcgatgaggacagaaactctatgtggtaggtacaatggatatccccattctgcaggtaggtgcaatggactcacccactttgtcaatgaggaaaaaaaaaaaacaaggctcaggagcccattcaaagcacgtgccaggaagggcagagaggaatttgtatccaggtcttctgactctagatcctgactcttttttttttttccaagacagagtttcactctgtcacccaggctggagtgcaatggtgcaatctcagctcacggcaacctctgtcttccaggttcaagtgattctcctgcctcagcctcctgagtagctgggattacaggcaagcaccatcatgcctggctaattttcatatttttagcagagacagggttttgccatgttggccaggctggtctcaaacttctgatccacccgcctcggcctcccgaagtgctgggaatacaggtgtgagccaccgcacccagctgatcctgactcttaaccactatacggaaaggcagaaagggaatgcctgcaaaatcacggggcaggggacagctggctgggtccactgccaggaaaaggggaacggggagaggccccaggggaccagactgcccacaggctgccaggtctgagaacagcacatttcctaccttcccagcagggcttcgcaaggtcatgagccagggccaccagggcctcaccctcccaagggccagctagaaaagggtcagccaatgtcggcccctggccagcacacgaatcagaaggaaactcacccagaaggatgcctcttccttgctctcgtgtcccgggagtcagctagtcagcagagagccctgggcacactgaaaacctcccagccaccatcagaggtcccacctctggggccacatggctgagtatccacaagatggaggcagggggccaggagctgcctccatgcacccgagacagagagacctaggacagagcttgagagacatgcgacaaaccagggtcaacaatcacacgcactcacccattctttccttcattctttccacaaatacttattaagtgcctacggtgtgccaggcataacacatgcacatttgctgcaacatacggggtgctccccaaccccattcatcttggcggcctcaaagcccacacaaaggctggcacagaaaagatgcttaataaatatggggtgggcaaatgagtgattagatgaataaatgaatgcccaagaggatacgctaagtagtaaggggccggcatccagggctggggctggtcggggacccagattccggtcttagctccagtacacctcagcccccaaccatgagtgaccttgaccaaggcaagtcccctacctgagcctctgattcctcataggcccaaaagaagcctgaatctcatgaacgccatcctctccaacctcacagtggggaggcggggctcacctgaatgcatggccactatgagacaggcacacagctcagctccacatcaggggatataggagccttgtggggtttcgaggggataggggaggccagagcagggatggacgggaggagaaagggtgcaggggagaagggagaccagtggagcggagaaagtgagagagccaggaacactgccaggtgagagtgagagggcagcggggtcagcaggaccagcaaggccagcaagccctggaaaggcttccccacctctcacttcttctcccaatcagatttggatgggagaccataccacccacccctgcagaaagcagaaccaccaggcgccacattctaggcatatccaggggttaccagagaacccaactgtacaggagccatcgggacactggggtagaggagtgcagtggagctgatggaaccaagttgttgaaataaagacagtcattaagtaatgacacatacaagcagcagatggctggatgcatgttccagggactgtcggggatgacagagaaaaaacagaaaagaatcacaggctctgaagccagcctgtctgggttcaaatccacactccaccatttagcagctgggggaccatgaacaagtcacttgccctctctgggactcatttaattaagtcacataattttaataaggtgatatatacaaagccagatgcttggctcatagtacagcttgagacaatggtagctggtaagcactgtcttgctgctgggttatgattcaaaccaacatgtgcagcatcgcagtgcagacaaaagctggaggcgtcaaacccggaggggtctggcaggaggcctcacatgctcctgaggatgcaggaggacaaggaatgtcatggcacaggccctcttgcaaggcacgaaaatgtccatgcataccaaaagaaaaaaaatccactccatcaggagaggaaagtcctgggtccaagtgtgaatcctccccttcccagactgtgcgatcctgagtaaggtgcgagccacctcctccgtgaaggggtgtgatcagcttacaacccacaagcccactgttcttgtgcccgccctctgtaggtggctgagggaaaaacggtccaggaagatacctaccatttccaaagtctttaccctggagcaacacgtttgtttttttgtttttgtttggtttttttttttttttttttggagacaggatcttggtctgtcaccgagggtggagtgcagtgatgcgatctcagctcactgcagccttgaactcctgggctcaagcaatcctcccacatcagcttcccgagcagtcaggattacagatgcaccatcagacccaggtaattttttttcccccaagacagagtcttgctgtgtcacccaggctggagtgtagtggcacaatctcggctcactgcaacctctgcctcccgggttcaagtgattctcttgcctcagcctcccgagtagctgggattacaggcgcctgccaacgcactcggctagacccaggtaatttttaaaatttttgtagagatggggttttgttatgttgcctaggctggtctcaaactcccagcctcaagtaatcccacctcagcctcccaaagtgctgggattacagaagtgagccactgtaccccgccgacatttctttttcattaaaaaaaatatcctccaccctaacagcctgcacgtttcctaaaaacatgttcccgagggcaagatgccttttctgaatctgagcaccaggtcaaagccctggcttagcctctattcagtgttcgtttgggtcctgctcacagagaagaaccctctcctccatgaacactctctcaagcaggccccgggaggggtgtggccagggctgggcaaagagcccaccaaccccaattccgcactcggcttgtgcatccattgctggccccaaattccaaaaggcagccattatttatcttcaggtttaaaatatttgcagtgcaggcagcggggtaacatttaacactcagcctaaagggtccccttggcagcagagctctaggcaaatattttaacacataatttgctgtccaagttcggcttcttaaataaggaagcaacttcctgatggctgtctggggagaccccggtgtccctatcggtgcctgtggctctgtggatggaatttcaagccaaggtccgtcagagacattgaacctgacctcggctacatcacacaagccttgctgggctgctccgtctggccatgagggactgatacaggacaaccctctgcagaggcccacagaaatgactagaaacttccagagaacgtatcttcagttgtcagcaagtctagaacctaaaggactagcagtgtgatggcaatcgcctccttcaggccagaacttccaattcctttgtatctttcgcctcgtgacccccagcccctgtcagggagacgttaccaccagacctattttacagacggcaaaactgaggctccgatggctgagacagccccctcagtcactcggataacgagtggagagaagctctcaactccaattcccccaccaccacacaaattacagaaatgagtgtacaagcgaatggggtgtggagtgagcacacagaagcccacccagggaggggtctcaactcctctagatggtcagcactgcaaacacacctgctgcttttttttttttaaagaagaaaatccatggctcacagctgtaatcccagcactttggggggccaaggcgggtggatcatttgaggtcatgagttggagaccagcatggccaacatggtgaaaccctgtctctactaaaaatgccccaaaaaaataaaaaattagccgggcatggtggcgcatgcctataatcccagctactcggggggctgaggcaggagaatcacttgaacctgggaggcagagattgcagtaagccaagattgcaccactgcactccagcctgggcaacagagtaagactctgtctcaaaaaaaaaagaagaagaaggaggaggaaatccaccgttctctataaaatttctggatgatttctaaatgttgacttcaagttttaagaaacacagtatgggctaaacaatatgccttggagggctggtccagcctgggggctacccactgagggtctctgccatggagtgtgtccagcaagagcccctcagagcccctagagcacagggtcatctgctcattcctcaccagaaagagcagtcagctgagcagtcagctaagcagtgatgaaagtgtctcttctttagagattcaggaactgagttcaagtccatttttgtgcaagaccttggttgcttgtacttctgagcctcagtttcctcacctagaaaatgaggatggtactcatgctgtggatgctccctatgggaccactttccaggtgacctcactccaggtctctgcccaccaggcgctggtcagcagtgagctccctaaacgttggaaccatgtcagacacaaatcctccacatcttcaatcagtcaacaaacatttactgagcacctactatgtgccagcccctgttctagatgcaaacacatgaaagaaccatacacagctccatgaccaggacaggctgacatttggtcacaaggaccttgttttttatgggtgttccatacatgcacgaatgaatgactctaccctccctgcagggctcagctgccacaaaatccccggaaggtaaagagagatggcagcttccccaacctcacagacacttgcactcagctctcaactacagtgggtcaggaatgagtggaaagaaaagaaggcagatgagagggagggaagaggggaggagggaagcaggggggagaaaaataaacctcaaacaccccctgcaagaaaaaatcaaatttatttttccagcaagtagttaatggtgtcactcctccaagccttacaatcttaataaaactgatctcgccgcgtgcagtaatgaagaacagtcagacaaagccaccctggaaccatgaaaattgtgcactgttacctcctcgtgacctcctgaggcagtgaccattctgccctcgccttgctgtcatgttttgtctctgggaagggggagatgggggagcagggccggcggtgggcaggggagggaggatggtcaggcagcgtggggagctcgataaatccagctaatttgtggccagtgctagtgcctgacactcctaattgctctcagtcctggagcagaactcaaggctaggatgctggggcgcaaatcaccccccttgtggctgcaaaaaaaggatcccggttaggggaagaaaagcagggagaggagggatctgtacccctaaaaccagaaccagtggccaggctaatggagtttggctcagagccaaggataaacagaggcggtgtgaatggagagcccagagcccaggggccaggcatcatcgctgtgcattccgggcaaggtgtgccctctctgggcctcagctgccccatctgtaaattaaggcatggaccacagagaagcaattttaaaaaccatgcaccttagcagctcaacactgtgccaggggcaggcctgaggacagaactctaagacaacacctccacacccagggagccccgctgccgcccgccttccacgccagggtcccgcagcagcactttgcagaaagagcctcactgtcaaaatagaaagtgtgtaaaagttcacctgcccaactcctcctcaccgttcaggtctcagctcagtgaatctgcacccccacagggtcaggcctcccctgtgagctctgggagctcgctgggcacctctccttctccacttatcatagcagtcctcatgattttatttgctggatgtgcgaaggtctcctgggcatgcaagctccaggcaggcaagtccgcatcagttttgttcactctgcttcccccttctccacctctcagcacccagcatagggcctggtacacagcaggtgattaataaggatgtgttgaagaagctgtctggaagggcccttcccactctgacatttaaagatccagccacaggtctgtatttccagggagggatgggacaacaggaatgaagcccgaagcaggcccctggtcctgcctgctgccccgggacacagggggctcaagggactccccagacccggctctagggcctctattataacccaaaagccagcagctcccttcccaccaatgatcctcctaccaacgagcctccaggtgggcctggagggccaggggagccccctctccctccagtcgcagtgcagaggctccacaaaaagcctttaaaaattaaccagttgccaggcatggagacagcctggtgcgcagccacgttccagggaatacggaagtggcgcctggagaaaagggagcaggactcgtggagtggctttcccgtgctatcccaccccaggaggagtacactcagattccaaggagccgctcccagtaaacccccatctaggcacccactcactggaggagggtggcagcctcagcccacctccaaggatccatgcaagcagctggctcctccaggagaccccaggggtctccccaccgcttaccctcatccacttgctcaggtctgccggctttctgccgacttcccgtcagtccccaagagggtgtttggagccccacaagtgggctgtaagacattctctgatgtctccagaaacctggattctggaagcaaggcacagaacaaagccaatggcctgggcagcatgacacgtctgccacagaggtccgagaagcctcagcacacacacagccaggcagggtgtccccatgctcagcacacatgtggccaggcaggctgtccccaggccgagcacacacatggccaggcggggtgtccccaggctgagcacacacgtggccaggtggagtgtccccaggccgagcacacacatggccaggtggggtgtccccaggcccagcacacacgaggccaggcggggtgtccccacgctcagcacacatgtggccagccagggtgtccccagctcggggttggggtgtacccagctcggggtcagggttttgatggggactgcactcagaccccccagccagtgacagcaaggcctgtttggcagcctaggacccctggattcacattcctaggcaaagagatgcagagacatggggggattagccacaggccaaaggtcaagtgaaccgcaccaaggaaacttccagacccaccccagggacctggctgcctctgcctgatggccaatatcagtgtgatctacatgcacacgcacaccccacaccccactcaccacccccaggctcctcctcaaaccatcacttaactcggatttcaaactgctggcgatgttctttagtcaacatgaagcagaaaccttttattaaatgctgctaattttttattgatcacactgtgaatcatttcattttccattaccgcaaatgtctcctatcagagctccacgatcaggcttctttcttcattcttgagtaacttgtcacttttaatcagttttcagtttcggtctggctcaaaaattagaaagcgggctctttgtatcattattgcttttgtttaaaaaaaaaagtttccatgcaggaaaggttattatactcagaataaatatacatgaatcaaattcagatgaaattcctccctggctctaaccaattttaccattagcttttataatttttttaggtttattttcacagaaagactgctcataattattgctcgtgctctcccaaaacacttatgttactaaagtgcgaaatgtcttctaacacaaagacagatctctgggaagtaattacagaaatgcattcaggggcaataattctatattagctgtcagcagcagacatcctctgaaaggcacttgttatgaaggaattatttgtgctactattgaaggcatggcaggcaagcccaaacttaaagactgcatctgatcagaaacatgggctccctcatcaagggtcaaattaagtttaaatcattaccttgaagcccagcaaactcgtacctgactgtctattgtgaagacatttttgaggcgcactcgagcgcgacgtggtcttcccgttcgcagcgtggtgcaattacccttagtctcaaaaggattctgccaggagcttgtcacaatagggagagaggaggtggcagggtgtctattaaatgctaactcgtgtcaccaaacagaattttcaagaattataaattgccgagatgccttgccgctgaccccctcgtgttaagaagagcccagaatattatcaggaaagtgcaagaatttgcatcaaaggcaggaaaggactctctatggggagcccacggggatggagctgaggggactgggacccagtgaactatcccctcaccccacagaaggtccaactgggatctgcgccccaacaccagcttactcagggcagagaaataccctaaaatgaggacaggtgcagggggatctgaggaagtacgtaatttcatctgagctttgtccctaactcttggcatgacctcaggccagtcacttcctctccccgagcctcagtttccccacctgtaacaacatcctacatcaactctgtgtggagggcattctgtgagtggaatgcaatgttggcccctgctgttccaggctctgtttccccacctataaaagtgcaggattaatttcctgcaccgttaaaggaatcacctggccactgggtgcgggaagaaaatgtgggacaaagagcagagcagcttcctgtgagagcgggtctcacagatatctcagatctgcttggactcatcgagcctcagcttccccacctcaaaagaggacaagctaaaggtcatagcctggggttgcccttatcaatcacagtgaagcacaaacccaggcttctttcatctgctcacctactgctattgccaaaaagacagggtactttctctttttttgagacagaatcttgctctgtcaccctggctggagagcagtggcacaatctcggctcactgcaacctccgcctcctgagttcaagagattctcccgcctcagcatcctgagttgctgggactacaggcacccaccaccacacctggctaatttttgcatttttagtagaaatggggttagctggccaggcaggtctggaactcctgacctcaggtgaaccacccacttcgacctcccaaagtgctgcggttacaggcgtgaaccaccacgcccagccaagactgggcgctttctaagacagctcagggcaagaagcaaaagaactacttcctcctaacagctggagcccatctacccgaagcagcacctcacggtgcccagcagtgctcagcagttgtggcacccctagccgtagcatcctgacctttccctgacctccgagctcggcccatgacccaagtggggacactaagacacaatccggagatatgctagaaccaccgggaaagaaggtacttaaagtggggagagcagagcgggcagacagagatcgggggaaagagtttgagccatgcccttcgactcagtcactgcccacagaagcttatatcctagaaaactcctgtttgtgaaagtccgccgtgagagtatctgctgcaggatgatttgtaatagccaaaaaaaattagcatctacatctccatgaacagcagatcgatagatagattgtggtacatttacagagtggacaccatgcagcaattaaaattaatgaaacagctacatgtatcaacacggattaatcttccaaacataatgttgagagagggaaaaaaaaagcaagttgctaaagataaactatctatatggtaaaatatggtatctatattgttttaaaacatgtatatcagtagtatttaaataccatttatatgtatttccagaaacaagacatacagggaaatgaagaattgatatcatctataattaaatatcacatatctccagaagcaaggcatacagggaagtgatgaatgccaagccctaacggggcaggaagagtagggcactctggcactcagctgggtgaacgattccttaagctgaaaggtatatcctggacagtcgttattctcttctgtttatctgagatatttcatttaaaaaaaaaaaaaacaccattgctgagccactgaaaatttttagatcataaaagtttttaaaagaacagtgaataaattggagaaccacagggaagcacagaattttagatggagaaggcactgaagaagacagccaatccaatccagcgctttctcagaatctgtgacgcaagagattgtccccagggcacaaggcaagttagtggcagaaccagggctattgccccagccctgtgctccttccctccctccggtgtggaggagcctagccctggttaggggatgagcttgaataaatggtactgaggtgcacagtggctgtcacttgtagtcccagctacttgggaggctgaggcaggaggatcactttagcccaggaatccaaggccagcctgggcaataagtgagaccttgtctctataaataaataaacaaataagacctaagtatattgttctctcagagcaggaacttctatctgttcactgtggaatccgaagcacctagaacagtgcctggcacgtagtaggtgcacaataaccccgtgttgaatggatgaatgaaggtagactgaggtgattaaagtcatgcacatcattccataaagcagaccttcttggacaagccccattgctggacaacaccaagttagtcatttttcagtaaatgcagattttccacctctgagtttaaaaagaaaatcacttctcaccaattttctgaccctcctgtgggtatgctgagattgtgagtcatggctgaggctggaaaaccaccttcggggagatgagaatggaaaacggcctaattcaaggaggagccaggtactgcctaaaacgcgtcttggcccccttccaggagtgcacatcgaacggaaaaaattactccaactctctccgtaggagaacatctgccagctggccgaccaaagtagctggttgctaagaaatcacaccgggtgacatcacctgatcacttactacaggcaagacatggccagggtcagagttcaaaacagtttctggaaatctttccagcgaagccccttttccgtgcagggatgggaggatgggaaagtatcttgatgggtacccacctgtgaccccctgccctatgacagaggtactattacagatagggaaactgaggccccgagggggaaggtcactgctagagggtggtagaagaggggttccagcttcttctgagcatcgaggtgcttcccgggataccaggttctgagccccgctgtgtgcacccctctcatgcagaaagaggtcaacagagaagtccagcgcatggtaaagaccagcgtgaccacaggctgcagcttttccacatggacaatgcggtttctatggagtccaggggctacggtcccatctccacggcattaaataaagagacgaggaaggtggcgaaacagcataggagagtaacctcctctcaagccaaggcaccactccacaggggtatctagcagcaccaagtctcaccaaagacagaagccccagaagtgaggtcccctgggagccctgggctatgccaggagcaggagtgggtgcaggaaggacccagcccacccccacaagaaacgcccatgccggggaatctgcccacactgcaacaagcatcccaggtcctgaccttgacagggatgcagggcgtgcattcggccagcctgtggtcttacccggctttctccccagaactgcttctgtgtttctgagtatctttccttcccagaaaaaaacgatgctttactgttatttctgattacaaagataactgcgactgatgtcaaagatacaagccatacagaaaagtataaagaaaaatagtaaaaaacacctgaaatctcactaccagagcttggggctgtgaccactttgatgagcgcgatcccgcacatcctctcctgcgtttacggacacgcgcagcaatcgccgtgtgcgaatgggatcctgcgccacacgctgatttgtaacctttctacactttgttccactcgcccctgggccatggtcatctcttccagggatcgttttgagagtctgcctttaaagtttcgtctggagggaaatcacacgggtccacaactcctagttaaatgtgaacaggccccagtagtgaattggggaggggtgggggtggggtttctatcttagaaaaggtttcctcgctttgcaaatgggttcaccctgggagtctttgcattaaggagattctccctcccgcgaacgcatgtgtctctggaggtgcaattcagggggccacctgcttcagcattgctgccatccactctccccacatcccagtccatccgtgcagatggaaagggccatgtggtggagagttggggctgaccttgaagggaaggctgccgtcagcccataccttgccgaacagcccatctctggctgtcactcacacctgtgcaggcaagtgcaagctcacctatcatgctgctgctcggggtgagtcacatcggggctgcttccttgcacccagtgatctggggaaaagtttaggaaattcctactctgggaattctcagttggcggcttcctctcctctttctcctccaccaataccccttcctaggcacaaaattgtgaggcttcctgggttttgtcactaacatttaaatatggggcttcaagtcatcaccctccaggggccaagtcaggggtttccaagaagtccctgcattcctctgtcctgggggatcccaggtgggggaagtgggctgggtgtttctgggaagcagactcctctgggaggtaccttcctctctttctgccaactgccagcactgagtcacagaagacgtgtcagccagacacagggaggagggccagagcccccagggtcagccagacgctcctctccagaagagaggcgcaggggcatttaaggccatctgtgcactcacaaaacactcacggagaccctgcaacgtgccagggactgtcccagagcaaaaccgggaatgaggtggacagatcctctcagggagtttaccctctagtggggaaaaagacagaagatgcataaatagagaaataaaatcattgctgtgagtgatcagcgcatccaaggaaataaaataattgacgtgacaggggctggaagacgccagctccagccagagtggtgagggagggagagcctcactgaggaagcagcgtgagccaagctgcagggaaccagacggtgatggtgacagtgatggggagcagcaagcacaaaggaacctgaggcatggagcatcgtgcactccaagaaccaagcggaggccagtgtgtctacagcacagagctgagagacagaggcccgacggcgacgaaaggcccgaggaaggcccaggacacgccatcaaatcctgaaatcagaaggtgctgggagagcccctcaagcggcccagagtccagtgcacacaactccattcaaggcacacatgggaactccagactgaagatagactgcaggtgctcatgtcacatacaagactgtttgacagcctccgtactttaaaataactcagcttggtcaaatcttttatttttgttgttgttgtatgagacagggtctcattctgctacccaggctggagtgcagtggtgctatcacagctcactgcagcctccaactcctgggctcaagtgatcctcccacctcagcctcccaagcaccaccacacctggctagtttttttcaaaaatctgttgtagagatgaagtcttactatgttgcccaagctggtctccaactcctggccacaagcaatcctcccaccttgtaatcctagcactttgggaggcagagatgggagcccacatgagccaccgtgcccagcctaaattggtcaaatcttattgggaaacatttctaacatgagagttctgagttagcaatatgtacccagctccatgcaaagtgccttggcctgggcactggctgcaaggtcagacctgggttcaaatcccatcatgacctcagccagaactagtcttctgatttattaaagagtaaatgatcttcaaacccatgctgggcttctgagtgtcgggagaggaagaagcagtaccacccatgcatgggctctgctccccaaaataatgatgggatcagccttgccaactcagcaactatgacagagagtggagcttggtgttgtctgccccagaggtgcactggagccacagtctgtttttcttccttccaaggctaaggttcagtggttcagaactcaaactcccacccaggcaggacagtgaagaggcccccacagcccagggagggcaaggtcttggccaaaaccccacagcaaggagggagcaaatgcagagcagcagctcatctcaggacccctagtgcccaccccaggctctcctggcccgtatcaaagtgctcacccccaaatccagctcctgcagaagaaagcagaattgtgtggccacatttccccctgcctgatattcactacctcaggaatcaaagaatgcgggccactgtgcccgtgacgtggcccaggaaggcattgcaaacaggtggcctgatgcctcgcctggcttccatggcccccaggcaagaactgcacaccggaattgggagagggggtgcacaccagtggccctcccccaccccacatggcttgggcctggggtcttcaacatcccttcctgacggtgtcccagccacagaaacccttgcataaccacctgggcatccacagcaccagccatttgacccagtaggggtctgggggagcaaggctggtccccctttctgaccatagcaacatcaccagagaactctagccctggatatctctccaagcctcctgtccttttcaaaggggagcccagggaggccagggagactgtctagggaccacaggagggtggcccatagagcaagcaggcttgctccaggaggtcacagagcacagaacagaccccacgggctgatcaggaggagaaaaaacctgcacaaattcatcgggacaactgagggcatgggcttgaccttctactgactggagatgcatccccgtgtgaccctaggttaattacttaacctctctgaacctccatttcttcatctgtaaaatgggaggttgctgtggagctcattcaaggtaacagagagggtagcatgagcctcacatgtcctcacccactcaacaagtcaggactgcggggctgctgtgtgccaggcaatgtcctgggctgggaacacagcagtcaaccgcagagacaaaatccactaggcagcaaggaatataatcatcagaaaatcgaccaggcacagtggctcacgcctgtaatcccagcactttgggaggctgaggcaggtggatcacttgagggcaagagttcaacaccagtctggccagcatggtgaagccccatctctactaaaaatacaaaaattagccaggcgtggtggcgtgagcctgtagtcccagctacttgggagactgaggcaggagaatcacttgaacccgggaggcagaggttgcagtgagccaagatcatgccactgcactccatcctgggcaacagagcaagactctgtctcaaagcaaaataataataatcagaaaatctcagggggtgataaatgcaaggcaagtattgaaacaaaggtgataggaggctaggcgcggtggctcacacctataatactagcactttgcgaagctgaggtgggaggattgcttgagcccaggagtttaagaccagcctgggcaacatagcaagaccctgtctacagaaaaaaaaaaaaaaattagccaggcgtggtgatgtgcacctgtagtcccagctacttggaaggctaaagcaggaggactacttgatcccaggagttagaggctgcagcgagctgtgactgcaccactgcactccagcctgggcaacagagtaagaccctatttaaaaaaaaaaaaaaaacaataaaaggtgttaggacaggaactgttgaaaagcaaagaggcagcttcagctctggctatcaaaaaaggcctctctggagaaaggacatttgagcaaacacttgaatggcacgaggaagccaggcatttggctgggcatggtggttcatgcctgtaatcccagcactttgggaggccaaggcgggcggatcacctgaggtcaggagttcgagaccagcctggccaacatggcaaaaccccgtctctactaaaagtacaaaaattagctgggaatggtggcgggcgcctgtaatcccagctactccagaggctgaggcaggagaatcacttgaacacgggaggagaagggtgcagagagctgagattgcgccactacactccagcctgggcgacaagagcaagactccgtcaaaaaaaaaaaaaaaagccaggcattaaaaggtggaggaagaatagtttgtttatgcaaaggccccaacccaaggccaggtcaggtggggtttcataaagaaacggggagaagtttggctttagtaactcctccttgttgagcaaggcagtggcattgcccccacctaacctgccctctctctacacacttttagttttcaaagcattcatcattgcatttatcagttccctcctgcattcaatctggcgtaagctccaagagggcaggaaacctccatccagggtcattgattaatccccgatgcctagcacagtgcctggtccagaagagattctcaataatgtttgtttaattaagtaattataggcactcagtaagtgctcagtaaatgtgatcatcagggctgccaatagggatcaagctgctttggaatgagatgagactcccatccctggaggcatccaagcaggacctagaagaagacatgctagggaccctcagacccagaagaggcttccaggtcctcttccactatgaaagctgtcaggtctgccctatgcccagtgcaagggatggaggggcagctcgggctgcctcagggacagacagcgtctcagcagccgtaacacatgtgcaccaagccggagaagccgcctgcatttctcaatcactagagatgtatttgcacctcaaagtgcggcctcctgcactgcttaatgaggaaagcaatcattatggggggcttgcgggcctggggtcggaaggaaagaaaaaactttttttgccaacattgtgtacagagtgccaggcagaatggacttaaatcctccctcaaagggccccctgggcagggcacttcctgcagacaattggaacttggcctgtagggttcaacttcctttgtgttaactaatttctgactcagggttttcagctatttctttctagaacaatacactcactgcaacagtccgccggtgcggctatcttccgcggtggcagcggcacgctctcccctgcctccctcctcagcaggaggggagggaggtgtgaaaagccatcgaaaagaggtggctgggagcggtcaagccctgtccccccacaagtgcaagtctcattttcagctctctggagccagaatgcaagacaggaccccaggaggggtctcggagcccccaggatttctgggcaagcaaataacaaagcaggcgggaaaagagggcacagcccccagaagaaaaccttcctccctcggtcattaaccgagcccaccagaaccctcccgcctcctcgcccgctttcccgtttctgtaatctttttctaatctgcttgccgcttcctgcttcctccaaaccaccttaattgggaactctttagttcacaaggaaagttcatttctgctctctgaggacacctatcgagggtaagccaggctcttcatcataattcttaccagacatggctaataatgaccctctttcgctaatgaaaaaaacacacacatgcacacattgtggctgcggtaattaagcctgtgacgagttgagttggagagaaattagatttatttacacgctgttctgttgctgatgaagcacaagctatcgggaagctttctcattaaccctcgtttacagggtgtgtgctcttttgtgcctctacgaaccctctgtaaattgtagttggttaaaaaataataataattagccattcttagagtggagttttctcctataactctgttaatcctcgagttacactgcccagatgctgatggtaataaaatgcccaaaggacttcaggtctgagctgcagccacatcaatgcatcagccaacaagtgttgccggaatgcctgccacccgaagaccctgtgctagggacccggtggagtcagagacggccctgcctcggaggagatcatgaaatcttcctactggaaaggaactgggtgagtggctgattgaggcagaaagaatgatgcaggggccagactgaaagccaggctgagtccaaggttcaggtagaagaaatagggagccactggaggtttgtgagtgagggaggggaggcaaatgcagtgtttaagcaaaattagatgacagcccacagagatgactggaaggtttcagagacaagggttttcaaaacggacttgctgttttgaatcctgggggcagcctgcatcagcccaggccgcctatcaccagttacgacagcctgtgaggtctaagaggctctaagtgtgtggcccaccactatcttaatgacagctctctctttggagggactgtcattttattaaacacacatacagacattaaaatgcttcccaatttcagaaatgttaggcaatgacaaaatacacatcttagaatgaaaacagcatgaacatcaagcgcttggaaaacagccttttggaaggccagtccccgccacactgatacggaattggacccctccccggagttccaacactggcctagacaaagagcacccggactgccacagatgactccatggcacctttcaggggcatcttcccaccaaatgcgtgtctcgaaaggtccctgcccatcccttaagcttggacccagggaagcttcaagttggaagggacctaagagaccacctcatccagcccagctctcacctgcatggaaaggaggaggtggcaaccatcaccacctcccagggcacacgggcaaaaaggcacgggtcatgggtgggctgagaacagggggaagcacccatgatgagttcggacacttgtgagcacccctgaggacaagtccattgcgagatggcggggggaagccagcatgcgcggggaggggcagacatgaacaggcctcagaacccatgtccacatggctgcataattccttgttttcttctagagtgtgtggcacttttaaaagccaaagtcctgccaaaagacagaaaccccacctaactatagtgagaagtcccattttgtgtcaccaacacacaatagacaactggccctgtgcaagtgtttttgtttttcttataaattacttgtcacgatgcacaatgacagttatttcttttccattacgctgtgcaatgttgggactgaatccaacactcctgtgtcctccacaacaaagacaaaaaaatagacttttaatcaacgcttatttataaatgaggccaagaatttccattctcattttttcctgtttccatgtgctattggagattccataggttcgtgatgctcttcctgactcagcttaaaactggctacaccgacatctcctacagtctgaacttctaacaaagggagccttcagtaatgagtcataaaaccactatcctgttcccatgtagagaagattaggtgaataaggaggccagccccctgctcctaccaacagcaaggcttgatcagccacctgcttgaagttaagtttccaggacatgaggagcacctgcatggtgaggactgcagaatgctgttgacccagcatttgaaaatcaccatagccctctcccatagaactcacctgtcagtaacttctaaaattcaacacatccctcaggctattgtggacacccaaaccaagccagacacgtgaccacctgcctccaaatcccccttgggtggggtgaggagcccggctcagcaggaaatacacccctgtcatcaattctggtgaagaaaggcctcaaagacaaacaccccacgtgccctggacagccccaacagcaaactcaggtttccctgccgtggcaggtgggagattaatttcccccagtgtactgaaggggaaagaaagggaaagaaagaatgacgcacaggatctcctttcccctcatgttaatcctcccctgacccgccctcggctcctcccctccacactgttggtccccctgcctgtggtcaccctggttcaggactgcggtacctcctccccaggtgactgtaaaacatccctggcatctccagcctctcatcaaactctgagtgaacacctgctaaatggtaggcacttcctgcctcgccttcacctgccaaaggtagaaaatggtttacccgggagcctaatcaccagaagcttccagatcaggaattgttagaaaggaatttgtttttttgagacagggtctcgctctgtcaccgaggctggagtgcagtggcatgatcttagctcactacaacctccgcctcctgggttcatgcgattctcctgcctcggcctcccgagtagctgggattataggcacccgccaccatgcctggctaatctttgtatttttaatagagacagggtttcgtcatgttggccaggctggtctggaactcctggactcaagtgatccacccccctcagcctcccaaagtattgggattacaggggtgagccactgcgcctgaccaaaagaatttttaaaataatcagctgggcatggtgactcacacctgtaattccagctacttggagggctaagtagggagaatcgcttgaagccaggacttcaagaccaacctgaaccacatagtaagaccccatctctacaaaaattttaaaaaatatccaggcatggtggcatgcacctgcagtcccagctactagggaggctgagatgagaggatcgcttgagtctaggagtttgaagctgcagtgagctatgatggcaccactgcactcccagcctgggcgacagagtggtctccaaaaaaagtaaaataatcatcactacaaaaaaaaattactccctcatgttccttaaagaatggcactccaagtctaaattatagtggcaaggggtacacacgtgagtgacagaactttaaaacaaagcaagggtgtgatcaccataaaagtcaagctagtgattctttctggaaggagaaacagggatggggaacaaggataagccttccgaagtagcttgcaaagttctatttctagacctgggaagtggtttcaatggcgttcaccttataaaaattcactaagttctacattgactttgtgggtttctagatctgtgtttcattttgcaataaaaccatatttttaaaaaaataataaaaggaaagcttgctggctgggcatggtggctgtggctcacgcctgtaatcccagcaccttgggaggccaagacgggcagatcacgaggccaggagttcgagaccatcttggccaacacggtgaaaccccatctctactaaaaatacaaaaaatcagctgggtgtgttggtgcacacctgtaattccagctactcgggaggctggggcaggagaatcgcttgaacccgggaggcggaggttgcggtgagccaagatcgagccactgcactccagcctgggtgacagggcgagacgccacctcagaaaaaaaaaaaaggaaagcttgctatccccttgcctaggtgcaatgcaacccaagagccagcgaatggctgcagggtgacatctagccagcccagggtcaacttacagataggtgctacagaccctaacagacaaccctggcgggaccacagcagcctcaggagcagcacatactcatgaaagttctcagccaggagtgcgctttgcagggcaatggctgttgaaaagcatggagttgcacttctgcaaatccagacaccctctgaaacttcctgcttttaacccctgtgacagcttagagttaagatcccaaaactctggaagtgttgtaagtttggaatgtgttgggtgcctaacattccaagtgtaaagtccttttttgtgtaattccacaacctccttcagacgtcacaggaggtggccctgtctgtgcagatgagactagggtccctgctgcacctgccctttggccctggttctctttagagagattgcgagttgtgggtgttcccctgggctgtagctccaagggccaggatcactttagacttgcttacactgtaaccccagtgcctagtgtttgcttagtgaatgggtgaatggatgggtagatcaatgggtggatgggtgggtggggtgggtagatggatggattaatgactgaatggacagatgagtggatgaatgggtggatggattgatgaatggatggatgcgtgggtggatgaatgggtggatgggtgggtggggtgggtagatggattaatgaatggatggatggatggatgaggggatgaatgggtagatgagctgatgaatggctgaatgggtgggtggggtgggtagatggatggattaatgaatggatggatgaatgggtggatgggttgatgaatggatggatgggtggatgggtgggtgggtggggtgggtagatgtatggattaatgaatggatggatggatgaactaatgaataaatttgtcaccctttcacaagagctttcctctccagcatatcctctaggggattaggaatcatatttgccttacttgccacggacccatcagcacctgagtcagggttcggcacacagtaggcctccaatatatttttataaatgaatgggtgaagaaaaaccaactgtgctagggatagaggatacgaagatgaccaagacatggtcctgccgccaaggacctcaccatttagccaggaatggagaaacacacatcagacaatgtgatgagggcaagcagcacaagataggagcacagacagaactcgaactgagcagagaatgagggagggcttcccagaggaggggacctggacctgactcttgattgaaaagccagaaagtctccccctgagactcaggacagcacccctaggcggtggttggggtcccctccaccccactgacttctcccccgaccatctgctatatccattgcttccaagagtcatctccccaaattccccctgccatgccgtcaccaccacctccctccaacacacacacacacacacacacgtacacacacgcatacatgcatgcacatgaacacacatatgcatatacgcacacacgcacacatatatacacataaacacatgcacacgtacacacacatgcacacacatacatgcacacacacacacatgcacacacacaccctctgagaaggccctttgcctcccaaacacagtgtgacctgagagaggttcagcccaggttacttgccctctctgtgacctgggtctccccagcaataaagggagacaatgacaatgtctacctcataggactgctggtggttaaatgtgagaaaccatgaaagggtcctgcacaacactgggcaccatagctgccaatagctccattctgactgccattgctacgactgaggaggccatactacagaggaaagcaaacctggcctgtgccagcctgctcccatgccacggcagggccttcaccctacacacagatccccagcgagcctgctcaaatgcagattctgcttcagcaggtctgggaagaagcccaagattgtgcgttactagaagctcccagtaaggagaacgacgctggtcccaggaccacgctctgagtagcaaagactcagcccaactgaactcattacctcacctgcaaaacaggagccataaaaaccacctcccagggctgttgtaaagagtaaatgcagcaacatgcgtgcgtatgggagccctcctgcacccagataggcacagagtgggtgctgagaaaatggcaactccttcctccatttcctccctcctcttctcccactaaccagctaattctgaatactattgacctctgcacaaacatccaaggtacagtaacagtgttcaaataaggcttaataagggaatgaatacatgaacgaatcctttaaaaagagagagagacagggtctcattctattgctcaggctggaatgcagtggcacgatcacagctcactgcagcctccaactcctggactcaagtgatcctcccacctcagcctcccaactagctaggactacaggagcatggccagttaattttttaaaaataattgtagataagatgtctcactatgttgcccaggatggtctcaaactcctggcctcaagtgatcctcccacctcagcatcccaaagtgctgggattacaggcatgagccattacacccagcccaaatccatatttaaaagctgctcagcaaaggcgttgaggcccagcaggctgagcctccgtgcccagacacctagagaagcattatgttcagaactgccagccctttcggaaaatgcctgtgaatctcaatccccacaccaggttgtattagtcatggtgcacgtcccccagcgccccagaaggaagtgggcctccactgagggcctaagctcaggcagtgtccacctttccccatgtcttccctccatctctggctataggagcccatgatgcccagacagaatgccccacacagaagcctgtggccagcccttcgcagggcacaaagaccccgagtgagcttcccaacctctctgtgaggctggtgagccaggaatgaccatgtctgtgtctagacaagaggactaatgttcatgaggtcaagcaatttgatgaggtcaggccaggaagaagaaaagataggcatcctgcacctcattctagaacaatttccccagcataagaaggcccaagacttactttacaagtgcagaggggaggactggagggctggcagctgtcactcaggaggtgcaaggacactccagactctcccactaccttccgctctcgggaacggcctaggtgggccctttgactcttaccttcaacaccccatctgaaggctgactgagcccaggcaaccagcccaacgcttggtcttggaatatcttattctaataattgagggggaaataagccaagtaaaaagcccacaacctccacatcactgaaatgaaaatgtttaatctcatcagttcttttcacgtccctttcatgatcatagctcactgcagcctcggactcctggactcaagcaatcctctcacctcagcctcctgagtagctgggattacaggcacacaccaccatgcctggctaatttctgtatttttagtagagatggggtcttgctacgtcacccaggctagtctcaaactcctggcctcaagagagcctccttcctcagcctcccaaagcactgggattacaggcgtgagtcactgtgcccagcatccctttcttattcaggtttaactcacaaatcttaagcaaactgggtgacagcaggtatttttgttgttgttgttctttgtactctgggttttttggtttttgtttttgttttgttttgttttgtttttgagacagggtctcactctgttgcccaggctggagtgcagtggaacaatcatggctcactgcagcctctacctcccaggctcacataatccacccacctcagcctcccgactgggactacaggtacatgccaccacacctggctaatttttgtattttttctagacatggggttttgccttgctggacagcaaggttttacataaatgagcacacaaatcaaggtatgggacattccctgcaccccagtaggttcccacatgtccctccaaaggcagtcacttcttcgcctctatcacagacatccactttgcccactccccagcgtcacaggaacagacacgtgcaccccacttctccgctgcctctgcttcctttgctcaacatgatgtctacacgagtcacccacacttgggggtggcaactggttgttcatctttattgctgcgttcatgccttcctgttaatttttgttttccaaagggtcagtttccacccaatccttttgccccatccatgtcaccatgaacaaacagaagaccacagatcagatcagcccgttccttccttcccaccatttgctgggtagctcgtttaaggtttaaagcatttccatcaccatgtctggcaaccagacaccactcagcggagagctacctctcctctgacggacctttgtgcagaaagtctcacggctgaggcagcctgctggccccacgggcaggaggagacaggaaaggggctgtgtctgtgagtcacccactcccacagccaaactgcaagagggaggaggtcgatgtacttttctcaggccaaagagaggatgtgtgtggggaagatggatgttggcaagagcccccaaccccacagaggacccctcgctcccatgccctgctgcggggaacatgagagccactcccagatacgcagcctctcaccaccagtcccctccagcataagagaagaccatgctgcactgggtcccactcaccccaccattcctgaacaaattaaagcaacccagtgtccatcaacagaggaagggataaacaaaaagtgggctagacacacaatggactatgattcagccttaaaaaagaaggcgggctgggactgagctcatgagggcctgcagagtggagacttaaatccaaggtcagggcaaaacatctggagttcattgccaggactgtgatgttacagaaaaggaccgtgaaaggtgcgtgcgggacccaacacagaatcgtggccatgaatgggctcgctgaggacattcgacatcagcggtgccatgagaagccatgccaccagcaacaggggaaagctacggaacctgctggcagatctacagcatggagatggctccaaggatcaacctcttggtggaaaagaactgtctggatcggcggggctgctgagcctgtggatacgacacccacctcttttttcttttctttttttttcttttttgagatagagtcttactctgtcccccaggctggagtgtagtggcacgatctcggcccactacaacctccgtctcccaggttcaagcaattctcctgcctcagcctcccccagtagctgggattacaggtgtgcgccaccacgcccagctaattttttttttttttttgtatttttagtagagacgcggtttcaccatgttggccaggctgggctcaaactcctgacctcaagtgatttgcccgcctcatctcccaaagtgctgggattacagccaccacccccagccaagtgcctccacctcttttcttcctgcaaccccattcttggttacctttctctaccttcacctcaatcccatgtatgcaaaaaggctgccacatagagaagtaaccccatgagccagcaatgagccttctcttttattaagtgaaagaaaaaactgagtagaacagtgtttgccagggcctgggaaagggcaatggggagtttgtgttttaatgggaacatcgtttcattttgggaagatgaaaactttccgaaggtggatggtggtggtagctgcactgaaaggtgaatgtactgtaacgccactgaactgcacacataaatggttaaaatgataaatttcatgtgacatatattttactataataaaaacaaattttcctgggtacagtggctcaggactgtaatcccagcactttgggaggccaaggcaggaggatttcttgatcccaggagtttgagacgagcctgggcaacatagtgagacctcatctccacacacacacacacacaaatattaattagctggacattgtagcatgcacctggagtcccagttacttgggaagctgaggcaggagaatcacttgaggccaggaagtcgaggctgcagtttgccatgatcgcgccactgcactccagcctggacaacagaacgagaccctaccttgaaaaataaaaaaataagtcaaagaaaagggaggaaattctaatatatgctacaagctggataaaccttgaggacattatgctaagggaaacaagccaggcacaaaaagaaaaatactgtatgtctccactcacatgagggcctggctgcagtagtcaaattcatacagatagacagtagaatagtggctgtcagggcctaggcgacggggaatggggagtgagtgtttaatgagaatagagtttcacctgggaaaatgaaaagaactctagagatggatggtggaggcagctgcacgagaatgtgaatgtacctaatgctgctgaactgtgcacttaaaatggttatgatagtaaattttatcttatgtattttaccacaatttctaaaaagaaaattttaatggaggaaaacagtagaatactgagaaaatgtatagcaggcagatgcaagaaaattcaaagcagaagtcaggatattaacataggaccaaatgcaattcaagggaaatatcattaaataagacaaggttgtttcatgtttttttaagtgaaggtttgcagctccagcgagcctaaaggaggagccaggcacagcggatgaggaaatctcctgcccaagaagtgacaggaaggctcctctccctgctcacacaggctcccaacatcactcccaggaaaacaaggtttgtggcaggcaagaaaacgcaggtgcttccgtcagctagagggagacctgatgccacagcactgagagaccctccttcagacatcctcacccacgctttttccaagcctgtgaccttcagagcaagtcccaggctctgggggactcccagtcctttggcttcttataaaacaaagtttcagatcccgggaggcccaggaaactcaaaacactacaggcctgagcctgagcctgagccgtggggaagctgctagcctctaactgaggcccagtctgaaaccaacaggcagattctctgcatctcggcaataaaagcaacagcttcagcagtgcagaccgagcctcggtccctcagaggccaggctcatcacagcactatctcctttctcacttcccggctgtgctataaactaggacctctgatcccattttacagatgaggaaactgacgctcacaagtcaagtactaaggttaaagtcccaagtaggaggtcctgggatgcaaacttatgacctggcaaactccagaaccccagaacccaattctttttttttcttttctttctttcttttttttttttagaggcagggtctcactctgttgcccaagctgtagtgcagtggtgcaaacacagctcactcactgcagtcttgaactcctgggctcaagcagtcctcctacaccacaggtgtgtgccactcgtgcacagataatttttttattttttttgtagagatggggtctcgctatgctgcccaggctggtctcaaacagctgccctcaagttatcctcctgcatcggcctcccaaagtgcggggcttacaggccaccgtgcctggccccagaacccaattcttaaccattagactgtgatggtcttctgagacattcaaacaacatgggggacttcaaagcctggagaccagggaaggccggggaaagcagaactcgaagtgggccaaggcacctccatctttgttcccagccaagaggctgcatcaggtacaaaaagaccaaactatcccttagccatcatcacactgattcatatgaaccattctgagattccacagcactgggatctaggaatcaatttgatccaacagcccatggagcgctgttcattgtcactgacatctaattagatgtcattcactgtcatccacaactgataaaaaaggaaactagtggaatgatcagagaggggcatgcgcagtcagaagtcacacagcaagttcccactgagttaggcctcatcctttaatcccagggagagtcagaccccaccaggcaccccaagaacatgccctcaaacacagcatcgaggacaacattccagcaggcaccaggacacagaaggaatcctctgaagtccacgcatccttccagccaggccaatacgcactgtctgcctgccagcctgacacttgggcctttgtattttattgctaattaatttggatggagatgtctttaaaaccaggcttacgtcgggtcctccccactgtctgtgaaccaatttcattacaacagaaaccgtgttgccaaaatgagaaatcccctccttttcaggcctgtgcccttgaaggcatcttattagaaaagaccatttcttaattaacatttttgatctttaatccattacacatccctctaatcctgtacggaggtgcggctggcccacttccgcaggctggctctgggctgcacgaggctggcaatttcagcgctgagggctcgcgcacagctggactctgccgtggacagtctgcagctcccagacaccacctctgctccagccatgggtacgtccctgagcgggagccgggaacgggggcgcggcgcggacacccccggatgggccagtctgcagacgagagttcatttcattaacccgtgagccccaactcttctcggcccagaatggtttcaagcaaaggctgttttagcagatccggctcccgcaaagcatgagagccgctaggctgggcttcccttccacacgtctcctgcaacctggccacatctaaacgaagagccggtgtcatcaaggtcacggcacatgtactcccacgccatcgcctgctttggaaagcagtggacctgcctggtgaccctgtccttcctggaagattttcttcatagggttctggggacctgcccgctcccagttttcctccttcctccctgacacctttctccatctcctcagtctctcctcatcatcccatccttcaacgtcgatgtcccaaccttcaatgccgatgtcccaacctgcaatgtcaacgtggccctagacctcagctcctctgtattcagtctatgctcaccccccagtgggtgcatctgtcccagccacacactcatggcacccaaaacacatcttggtcccatcctcccccgattgccagaacacacgttcaagtaccccctcaacatctcacgggcatctcaagcttatcatggacaagccgaacttttgagccacaccatccacaccgagctgccctacgccctgacaacttctcctagcaccctgcatctcagtgagcacagccccagccaccagctgcccaggccaaaaaccttgcaggcttcctcagctcctctccttttctcatgcccaacatccaatccagagacaaactcttttcaacctacctccaaaaagaaacttgggcacatgcctgtaatcccagcactttgggaggccgaggcgggtggatcacctgaggtcaggagttcgagacctgcctggcccacatggcaaaaccccatctctactaaaaataaaaaattagccgggcgtggtggtgggcacctgtaatcccagctactcgggaggctgaggcaggagaatcacttgaacccgggaggtggaggttgcagtgagccgagatcgcgccaatgcactccagcctgggcaacagaatgagactctgtctcaaaaaaaaaaagaaaaaaagaaaagaaaaagaaagaaagaaaaggcaagaaaagaaaaaagaaactcagaatctgacctctgcttacctcctgaccttgctcccaaccccataagcttgcacctggatgagtacttggtcagccccgaccatctcttccccacacacaactagagggacctcttccagatataaacctgatcacgccactgccctgtgcaaagccctccctggttccccatcaactcagaagaaaagccaaggcacccactaaggctccaggcctgaaatgagacacttctgcctgctcccctcgacaatctcccaacctcacctccttcctttctgctccgtctttcccctctctccccctctcatctccctgacctcacgctccccccaccacctcatttcacacccccgtctccctccctcatctccaagcccacctctccctcctctgcctggcacttgctctcctccaggcacagtgaagtcccttctgtcccacagtggggaacgcctgggacactgcttccgctgctgtgcatggctctaacgccccctccttggtacagaggcctctctgaccaccccaacacagccggccctctcctcctcacctcccaccactctatctatctggtcaccctgctggccacccctagtgaaagcatgtggtgcatttttattcattgattcattttttacttttctagtgccatctccccacaagactgtgagctctgagcacagcagagactttgtcagttctgttcctggatgttcaccagcacatggtaggtgctcaataatatctgtgactgaaagaatgaataaaagaatgaacgaatgaatgaatgaatgaatgggccctcatggatcctgccagtggtgcaggctcataaccatcacagcccttcaaagagaggtcttgcaacaacagcaccgaggctcagccagcagcaatggaaaaagtggttagacattaagtagaacttcctggtgctagaagtgctgagaaactgtccatccatgagtaaatgtatagtgtgagcctggtgctagattactggggttagggggagtaggggagggagagaacctgctccacggtgggaaggagacgaagcctatgaatggctgaggaaaaggaacaagccagcatgtggtcgtcataggctctgaagggcaggataggggttcatggaaaggacaggcccccccagaagactcacgtgcaaagggtttgtggaaggcagggacagcggctgggccttggaagactgccactttggagtaggtgggaaaggggagagagggtgctctcggaggggcacaaggcataggggccaagatgcagacgaaggacaaagtgcgggcctacaagagatcatctccgggccctactacatcacccaccaacgtggctctcccagccaactgccccagtgaagcctctgttgcttccacctggcccagggcactaagacttcccaaagttgttggtggcctctgaatccagccagccaccccacaggagcctccccacggcagcaggaggccatggcttccagcccccaccttccctccctcgcaccagagcttggaggggtgctggatgctggaggagtcggggccaagggacggaggagcagagaagccaatcttcccctctgccaaggcccaaggcacctccaggtcaggccccgggaagtgggctgagaggtgttgttcaggagtaagactaagcataacaccaccgatggagactggtatcatttggctgtgtcctgtgtccccacccaaatctcatcttgaatttcttttttttttttcttttttttttttttttttttgagaaggagtctcactctctcactctgtcacccaggctggagtgcaatggtgtgatctcagctcactgcaacctccacctctcaggttcaagtaattctcctgcctcagcctcctgagagtagctgggattacaggcatgcaccaccaaacctggctaatttttgtattttttgtagagacagggtttcaccatggtggccgggctggtcttgaactcctgacctcaagtgatcctcctgcctcagcctcccaaaatgctgggattacgggcatgagccaccaagtacagcctcatcttgaattgtagttcccaaaattcctatgtgttgtgggagggaccctgttggagataattgaatcatgggggcagtttcccccatactgttctcatggtagtgagtaaatctcacaagatctgatgattttataaggggtgtgtccccctttgcttggctctcattctgtcttgcctgacaccatgtaagacgtgcctttgctcttcctttgcctttcaccatgattatgaggcctcccagccatgtggaactgtaaggccattaaacctctttttctttataaattacccagtcttgggtatttcttcacagcagtatgaaaatggactcacacagagaaaattcagctcccacataccctcaccagggttctcccaagaactagagccttagccagggttctcccaagaactagagtcaagaggatccacatatggatatatggagaagtgttatgagggcctggatcacacagatgtgttatgagggcctggatcatacaaaagagatgtgttatgagggcctggatcacacaggtatagaagctggaaacatcccaccctgtgtcatctgcaagctggaagcccaggaaagccgatgctgcagttcatgtccaaatcccaaggcctgaaacccaggggagctaatgttgtcagtcccagtcccaggctgaaggcgcaagaaacaggagtgccgacgtccaagggcaggagaagacggatggcccagctcaaacaaagagaacaaattcacccttcttttgccttttcattctatccggaccatcagtggactggatgatgccagcctgcaccggtgagagccgtctgctttattcagtccagccatcaaaatgctcatctcttcccgaaatacctgcacagtcacactctgaaatcatgtttcaccagctgtctgggcagcccttagcccagtcatattgacacagaattggccatcacacctgccctgacacattggtccaagcatccttggtgaacccgtgggtcaggcacaggctcacccctgttgtcccagcttcgggggcaagggagtgccaggttctaaagttagtctatgaggcaaatgtgtcttagagtcaaagttattccccaaaactctttcctctcccctaagatacaactgctgtggcttgagatacatccatggagaatggtttggtccatacatcaagcatgtgggatgaaaatacatcttaaaaccccagagtcaaatttacctgccccacaaggggccacagagaccaacacccgagggaacagcagattctcacccacatcacaggttgtattagtccattctcacactgctatgaagaaatatttgagactgggtagtttataaagaaagaggtttattgactcacagttccacatggctggggaggcctcagaaaatgtataatcatagcagaaggcaaaggagaagcaggcaccttcttcacagggtggcaggatggagtgagtgctgagcgaagggggaagccccttataaaaccatcagattggctgggcactgtggctcatgcctataatcccagcactttgggaggcctaggcgagtggatcacctgaggtcaggagttcgagaccagcctggccaacatggcaaaaccccatctctattaaaagtacaaaaattagccagacatggtggtgggtgcctgtaatcccagctactcgggagtctgaggcaggagaatcgcttgaacccaggaggcgaaaattgcagtgagccgagatgccaccattgcactccagcctgggtgacagagcaagactccatctcacaaaaaaaaaacaaaaagcaaacaaaaaaagccatcagattttgtgagaactcactcactgtcacgagaacagcacgggggagactgccctcatgattcaattatctccacctgttccacctgacacatggggatttgggggattacaattcaagagatttgggtggggacacagtgcctaaccacatcgcaggttccctgagtaagccagctcctgttgactgcaattgccaatccctttacactgttattgtcctcattttttggcaaatgtgcctatctatgttgaaggaagttaaatgataaataatgacctgtacataggcatatgttgttgtcagcaaagtaaagggtgagtggaatctgtgctatagtgcagctctgccacaaacttgctgtgtgacattgggcaagatgcctagcctctctgagcctcaatttccacctatgaaatacaagaataatgataataccaatggtcaaagtgcgcccgcaaggactcagtgaggcaatgcctatggaaatgcctgcttgagggaggcaaggaggcagagtgacaaccacatgggccttggggacagtgagctgagtccaaatcctggcccagccatttaccaactggctggccccaagtctctgcaagagcatgcaaggaatgccagcacagacatgcacgagctcaagggcagaaccacaggagcctacaacagtcagctcccaaagcgaagccacactgtgcagctatggccctatctgagctgtggccgtccctgatgggtgagtcctacgcagctctttcccaggctccttggggtcctcaggccctgtggctttgcagaagtcagggactgtggctggaatcccaggctggccacctctctttgcttcctctttccacgtttggagaaggcatttcctccccttccagccctgggccagtgggtcaggtttccacccagatggaaagtcccacccagggcccccagaggacagctcaccatggaaactccacagggcacccgccagacacggagtaagtggccactggcaggcctaactggggcaggctcccagtcctgcccaccaggagggggaggtgggcaggagagggagagggggctccagccagactttagatctcagacacagaacaacgttcctacacacgcagagcaaaaagtgggtgatcgtgcgtgcatgcaggtgtatgcatgtgtgtgagcatgccctgagccctctacgcattctgagcctcagtttccctaactgcacccctgttggaggctggattggactcagataagatgagtaaatgcaatcatccagtaagaagtaagcaacaggtgggtgggctctgccagatgaagacccccaggcctatcggaataaaccacagccaaatgacagtctgggcaaggggaggaggggacaccgtgagtgaggtgcctcccatggtgttcagttcaaaggagaagcacataaacagagcttcccaaactgtgttccaagattccgggcttagggataggtggtagtcaaaaaaagggatgaaggacagattctgagcccaagagttttaagaaccctctctatgactcaaagcatccacaggcatgttgagggcccttggagatcctgccttaaagaaacccattcaattgcacttaaccaggcacttaggaaagttaccccagcagctgccccaccagcccccagacgcagcccagcaaaggcagcattgcctccgcccagctccctccaggctgtactgcatggaactccagggttgtgtggtgcactgaggcacggagcatttttccagggtcaattgaagaaggaactctaagaaagatgtttctgcatcgtgtgccaaattgttactgagatggttcctgctgtttgtccattgattaatgaggatccacagaataaattcctcagcattccaagccagggggaaaacactggtctgtcccaagctcttacataatacagaagcagctttgattctatttctctttgggccttggctgccaggaggctcaaaggcatcctgacccttcccttaggttttgacataattagtctcttcaactattatttgagctccccactgacccacaggccacctcgacagcctttcattagtaatcatcacagttagcacttattggggacatgctgtgtgccaggcaccatgctggacacatgtcatgtaccctctcacttgtccttataatggtgccacaaggtaggggctttgttattcccattctacagatcacaaaactgagctctgggaaggtgcaatcactgagtcaagcccattctcacagtgaatacacttaatttgtgctgtgtgtgttcacctgcccactgctgcctcctcactctagaatgtgagtcctggaagtcagggacccaactgtgcccttgtggcctagaagcacacagacgcctgacaatactatgatgaataactggtggtgaatcaggattgaaataagggcctatctgcctgaaaacccatgcccttaacgctcgtgtctttttggtctgcagggtttggtaaacctaacgctaaacttaaccttcagtgtaaccctaaccctgataaccaaacctatgctaacctctagcataatcccaaatgaattaattaataagccatgaaatgctccctgcctgaccctgtccttggctctgtggggcaagggctctgaacacagaggcttgggccatttagggagaggagatgcaggagctcaggtgacagcatagatggactcaatgaagatggtgggagcacatggagtcggcagcagggagagggcagcggagacggaaggctgagtttccctcctgggaggcctggccagacctgagtagggcagaccaggccaagcggagctggagcagcggtcacagaacaggaacgctgagccgacccccactcccaggagcggctactctggcctgcgagggccagcccagcgggtggggaggcgatgccctgcccagcttcctgccccattccaagctggccaggagccccacagccagcacaggaaataacaggggcccccagaggccgcccaggcaggccctgctccgaggccacccggggagggaaggaggccattgtcggcctttgtttcagtttccccagcattacccaggctccaagaggccactgggagctcacaaagcttccccccaacctgcagctgtccagcctcccccagccccgaccctggggacaggcctgccaggcccctggtctcttaaagaggcaggtgcagggtgtaaaatgaagtcacatgcaagttgggggttgcggggcggcccatgcaggccacagcaggccaggcaggcgaacagacagatgcaccaagactggggtctaggtccacaccagggtcagcccagcactgggcccaagtgcaggggtgcaaatctttggatggaaagaatgtctagggccctgagggtacgacaaagaaatggaagaaagaaaacagagcaaggagacaatctggacatcttgaacaccccgcctgggcactgttcctgatccttcaagggagacagcccagaaacaggctttttctgctcatttgcatgcctgggtgtggatgagtgaatgctgcatatgtgtgtatgcctctgtatgtgcatgcatttgtaagtgtgtgcacatgcgcactatgggtatgttggcagtgtgaacacactcctgtatgcacgtatgggtgtgcatctgtgttatgcatgtgtgtgcatacctgtgtctgcaggcatctgtgtgggtgtgcattatgcatatgcatgcacttggctgtgcgtacatatgtgtgtagtatggaggaacatgtatgtgaaggcccatatatgtgaatgtgtgtattgtgtggagtatgcatatgccaatgtgcacatacgtgtgtgtttacatgtgcatgggtggtacatgtgcattgtgtgcaaatgtgtacctacatgtgtgtgaatgtccatgtgcattgtgtggagtacatttgcactgagtgagagtatgagcatatatatgtatgaatgtgtgcatgcatccttgtgttggtgtgcatgtaatatgtgtatgttgtgtgtgcacatgcatgcacacacaatgacttgtgaatttacacatcaccaccaaagagcactcacaggtttttgcccattagcaatcactcattcccacactgaccctggtggcttctcactagtggtgtgtcgctgcaatgacattagggattacagcacattctagtgcccgtcattccaccaagatgcagtaagtctccactgagtcccaggcactgtgaattagcaactacagaaagcgtgccctagactcagacaaaaccccaactagctgtgcagactggactagtctctttagctctttggcctcagttgctcatctgtgagacgggaatgctaatactgtggttaacaaggcttaaatgagataatgcatgtcacagccccctgtctggcaccaagtggatgctcactagatggttattattttttaattgttattgttaagacagtgataattgctgaggatacgacaggaagcaaacaggcactgtccctgcctccacaagcttgccaggtttgcaaggcatttagccttgataagtagaatagcataagtaaaatatatcatatttgccagactaagcatgagtctgatgtgctaactatcacgtatggccagcagccatcagttaaagcaatcaaccatgacaaaggagaacaaattatcagtggaggtaaaataataattttttgaaccagagaggcatcagatagccaggttcagcataatctcatgtgtgtgagagtgtgtgtgtgtgtgcgtgtgtgtgcacctgcctgcacattcaagaatgttaagggaatgtcagctgacatgacagcagcctaacccctgtgggctgcctgcagtctacagcagggcaccattgaccatatccaacccaggagctgggccctgcagagtgtccacccaggaagccaacacacgccaggtggtgtggtcaagctgattttggccatttcctaatgggcactggcccatggccgcacagtccatgtgtccagccccacccaaggaaggaacctgatctcaggtcagcctcaggcctctacctttcagagcagacccagcccacctcccaccaacccccaccccacctggccttccccacttgggaaacaagccatgcctcaccaaccacggtgaacaagaatggttccctacagactcagttccaccccaaatctgcaggaaggtgaagcggattgccccaggcactgtggccatgcccagagattgccagtcacgatgtggggagaaaggcaggaagctgtgacgatgtgacgagaaggaggggcccatctgagccttctctgtcacccatacagacgcaaagctcagagctaagctcctatggcacttccctccacatggtgtcaatagcaaaagtaaaggtacagggtgccaggtggcaccttaggggttgagcactccatacggatttcccgtgccatcctcacaatggccttaggaagtagaattattattctccccatttccgatgagaaaatgaaatgacagggaggtttagtaacttactccatattgaacagctaataagtatctagacctcaaacccagattttgctctaaacaaagtgaacaaaactcaggccctgcacttcccaggacaaatacagacgaagaagtagaggtgagattctgcatcttggcagacatttgccaggcacctgccaactgccaagccagggctgggctgtggagacacagagaatcagacttggtcactgtcccctaggagtgagcagagcatcagggagctgggtataagagaaggaacattagaaccaagcagagggcagcgggagcactgagggccaggatcaggagctctttggctcagggggcacaaaattatgtcagggctatcatgggaaacttcctggaggaggtgtcatttaggctgagcttcaaaaaatgccaaggggacacacacagtctatggaccagcagcatcaacatcaccctggagcctgttagaaatgcagaatctcaggccctacccagacctgctgagtcagaatctgcatcttgacaatttgcacacatgttcaagtttgaggagcactggtgcaaaccaccccaggacgcacaaggctgggcaacactggagggagcaggatgggcagcaactcccccaaatgcatgaggagttatgccattggcaccccaccccacacaccccaacccacagacatgcctgactgtttacaggcaggcttcaagtcgccaaagaactattgatttccagtgtccaccagcaggacagcgggatccttggggacctaggaaacagccaacaccaaagagaggcctttccatcctcagggagcaccccagctttggagaaagtaggactggcccctccttgtctttacaatcctcattactgaagtcccccgaaaagcccaacagcaccaggagaggaggggcagggccatgggcttgctggggcagatggtcccaaatcaactgagcaactgcgctgcaaaatctcaatgccaggccagggacacgagacaaatgacagcatccctgccatcagggaagccccaagtccatctcaagtgggtggaaatcagcaagacaagcctagctccgtggaagcgaagtcatcagccagggtagaggtacaggaggaaaacaggagtcagaagacgcactgcacacgtgttcatttccacatgtcctgggtaccagcacacttgagtccagagcacacatgtgtacatgtatgcacaggctctgcatacacatgtgcacagcaggcatgtcgacgaggaagccaagtacagtggagcccaatgggggccccaaggctggtgcagagccagaggaaaagggtgggcaggaaatgccacctcctcctcagagaactggtccaaggcagccccagggagcccaggatgcagcacaaaccagcaggcggagcacaggggtgctggagcctccccctgccaggggtccgagtcagggctgcagctacctgggcatacttacacacaagcacacacacaagtgcatgcatccgtgtgcacacaagatacagaatgccctaccccatagactgctcaccatggtaacagagtggccacctctcagctccagtcaccacctgacgatttctgaggccccctgtgctagagggggagcagctctaacaaaggcgcagcccgggctgcctggccaggggtccatggagccaacccgccagcgcatgcctgccacgctcccccggtgagctcagggccaccgcgtcttcctacccagcctgcctggctccacttagctcaactccccacaggctccccagccgagctaatgagaaactccccagctggccccatataaaaatgcatttcataagtctttaaaatgctgggaaattctacatctatttagtgagacttttttgctcctttaaaatgtcccttggtcctcatcaagaagatgattgggttgagggctcaagcacaaaaggtggacgccaccagcacaccagccggaagccaaagggcgcccaggcagcatgcaccacgggccacagccaggcagctccaggcaagtatcgtgggtgggtgggacatcccacaggtgacccaatgcaggacggtcacttggggaaatgtgtaaagtgagacccagcggggagcaatggacagagaagaggggaacagtctctccagccttgatttggggattgaaagaaaaagttagaaggtgctgggagcccctgagaaaatctccaaaggagaaaaaaaaagaccacccacacgaagatgttcatcatggcattatttacaacagccatcacctaaagcagtccaaacgtccaacaggggagaggcggagaataacattcatgcccatccactcaagggctccagcacagacactaaggtgagaggtacgtgggtcccaggatcacaggaagctcaggtccaacagggactacagggaaacccactgcgagttcagcgtggacttcatctagaagcttatagacgaatggagctcgaaaggggactgggagaaatgcaaacgcaagtgcagaagcgcaggggtgtgggtggagtttctgtgaagctgttgaaataataactatgcactccagcaaaacacaagcagggcaggaggcagctccgcgtggttcagaagtgcaggcgggactgcacggagtggcctcgcctccccatggtgaaaggcccgggcttctggacatttctatccatttccccagccaaaacctcggggcaaaggactgcaggggatgaggctgtcgccttggtcaggagcagggaccctgaccattctcctcaccccaacttttacccagaaccaggctaaaagaaaaatgggaggcttcaatgcattcttcccaaggaggtcccaggacaccagctaccccattgccagctctacctcccatctgagcaggtcccagagactgcagccttatccccaccttcccctgcaaactggccccatgcccaacacccagatgtggaaggagggctggggatggggctggaggtggtgtgagtccctgcagagagcctggcccagtgttttccaggcctggctttgaacatgggagatgtgtgcaaggtcttcaaaacatgtacctcctctccttccaggcagcaaatcctgagagctggctgcagtcagactcttctacctgacccaggagtgaccggggcacagagctgattccagagagtctcctctaaaacaaggcatgggacccactttctcaccggcatgtctgccatctacagttgaggcactaaattcatgcatgagcggcctgggttcaaaccctcactctgccacttcttggctgagtgacctagaaccaagttatagcatctctgtttctcggttttctcacatgtatgtgaaaagcactggaaaggagccctggctcctagaagcacctcgtaaatgggagtgacggttcctattaaccagagcaagaagacctgtcccatggcaggaaagcctaaaagtctgatcacagtgcgacaccaataaggtctcaggctgcgggtccatcacggtcaactgataatactgagtgttcctctcaaaccacaagtgtgtctgtcaccatgccagaaataaacttacctaacctgcccaggcattcacaagaagtatgtgtcagcaaactgtgtcctatctctggcccatccacagacccttctcctactgcctctccctgctgctgttccagagctgctatgctggatggaagccatggagcagactctgcccaaccagtcccagaacccagcctggagaggtgggagattccaatgagactctgactagacaattacataaaaatgacccccttacccacttcacgctaagcatggtggtacatgcctgtaattccagctgcttgggaggctgagacaggaggattgtttgagcccaggagttcgagaccaacctgggcaacatagcaaggccctgtctcaattaaaaaaaaaaaaaaaaaaaagatgagcagcttcagctcccagatcaaactcagtcacagggaaagaggaggtaaatttccacatggtcgtgttggttccctgaaaccccacatcatagacctcaggatcacgcatgatgtttctggtgtctgccacttagagacctcattccaaagggcttgtgggaagagggaggaaatgctgaaggtaagatgtgtctccctgccaggctgggatgggcgggagagacaggggttaggggtagggttagggttagtaccaggctgggatgggtgggagagggggtgattagggttagggttagagttaggattagtgccaggctgggatgggcaggaaagagggggattagggttagcattacagttagggttagggttagtagcaggctgggatgggcgggaaagaggggcgttagggttagggttagagtagggttagggttagtagcaggctgggatgggcgggaaagaggggggttagggttagggttagagtagggttagggttagtagcaggctgggatgggcgggaaagaggggggttagagctagcgttaggtttagtagcaggctgaaatgggtgggaaagagggggggttaggtgtaggggtaggtttcgtacaaggctgggattggcgggagagagggggggttagggttagggctagtgccaggctgtgatgcgcagaataaaggggatttggagacgttggtaggagggaggtcaaaggcactgggagcctttggaaggctgacgcttgcagatcacaaggtcaggagatcgagatcatcctggccaacatggtgaaaccccgtctctactaaaaatataaaaattagctgggcgtgatggcacgtgcctgtagtcccagctactcgggaggctgaggcaggagaatcgtttgaacctgggaggtggaggttgcagtgagccaagatggtgccactacactccagcctggcaacagagcaagactccaactcaaaaaaaaaaaaaaagaaaagaaaaagaaatccatgagttgtccagaatgagataccttcatgcctactaggaagtttagaatttacaaaaaggaaaataacaagtgttgacaaggacctggaaaaagtggaatcctcatgagcagtgggaatgtaaaacgcctgggaaggtctggtggctcctccaaaggttaaacataaagttgccctataacccagcaattccacgcctacaaacacacccaaaagaaataaaaacaagcgttcaagcaaaaacttgtacattgccaggtgcggtgacacacacctgtagtccccactacaaggggaggctgaggcaggaggatcccttgaggtaggagttcaaatccagcctgggcagcatagctagactccacctctaaaaacaaaacaaaacttctacatggatattcacagcagctctattcacaatagccagagatgaaaacaaccaaaatgtcaatcaacaatacccaaacaaaatgtggtcctcccatacaatagaatattatacagccctaaaaaggggtgaaggacagacacctcctataataacatggatgaaccttgaaaatattaggctaagtgaaagaagctagtcaatggagattatgtattatatgactccactgacaggatgtccagaataggcaagtctacagagacagaaagtggatcagccaggtgtggtggctcatgcctgtaatcccagtactttgggaggctaaggtgggtggatcacctgaggtcaggagttcaagaccagcctggccaacatggtgaaaccctgtctctactaaaaatacaaaaattagtcaggtgtggtggcacacgtctgtaatcccagctactcggaaggctgaggcaggagaatcgcttgaacccgggcggtggagattgcagttagctgagatcatgccaccccactccagcctaggtgacagaatgagactctgtctcaaaaaaaaaaaaaaaaagaaagtggatcaatggttgcctggggctgggaggggtaggagggcaggggtgatagctaaggatacagtgtttcttttttattatttttttctttttcttttatttagttagttatttcagaggcaggcaggcaagttatcactctgtcacccaggctggagtgcagtgtcatgatcataactcaccgtaacctcaaactcttgggctcaagtgatcctcttgcctcagcctcccaagtagctgggattacaggtgcatgccaccatgcccagggctattttgtttttattctttgtagagacaggctctcactatattacccaggctggtctcaaactcctgggctcaagcaatcctcctgccttgacctcacaaagtgctgggattacaggcatgagctaccgcgcctggtccagagtttccttttaaggacatgaaaatgttctaagttgactgtagtaatggtcacacatatctctaaatataccaaaattcactttaaatgggtgaattgtatgatatgtgaattatatctcaataaagctgtttttaaaaagatataagctgggtttgtttgtttttatttttttaagaatctaaagatttcttatgaaaatccagctttctggcttttcttttaaaacctctgaagatctggcaactctggacccagccagaattctggcaattcatggcccagccagcaggagctgagggccagccatcccctttgcaaggtctgtgtcaccatccaccacggccccctcacgtatcagcccacctgggccactagcctgccttgggtgggcctttgagtttgtgaccctggcaaggttttcccatttgcaaaggactttcacatttgtaaggagttcacacctatggcctggcaaggcaggagaagttggggttggcaggagaagaagaatgacccacgaactcccctgaagtcacacatgaaaccctgtgtgtgtccgaaagagaatccacacagttccactggatgcccaaaggcacctgtgactcaaaacaggttaagaactcctccagctccacacctccaaggcacccccacatcttgactccagatgaagtgctccttcccctgggctcaccattagcagccccattcaccagcaagtggcatgagtgggcctgcgcactccgctccccacgcccccgcctccggactgcaggatattgccatgagctgatcatttcgctcctttccctgccaggcaaggccaggctctccatcactgtcagggcccccgctcgagggcacggaaggagcaagcctggttgtttctgggggcggagggccacagggtccccactggcagggtggccaggggaggccaggggtgagtgaagacacaaactgcgcattctgcttctttattgcagttctccatcacacacccaaggctgggaaaagcaggggagaggaaggcgcatgaaaagcttgcgctctgggccaagagggccccccaagaagaggggctgctccatgccttacagctctcccttcctcctggtaaactgccctcagcccagggacattgggggcctgtgagcaggaccacctatgccctgcagccaccaggcctgtcttgccagggaccttccagaagtccccataatgccctgccttcaggtcctgctcagctctccacctcccgatgccaagtggtgcagaggtgaaaccacaggctctggcttctggaggacttgggttcgagtccctgatccacagcttgccgactggggaccgtggattcactactgtacagctccaagctctttccctcatctgtcaaatgaggatggggattctcagtagcagtgccaaggatggcctgggaggttttgctcccccataatcttctttggcatctgctgccattctctgatgtggccaagtgacattttctcagtttaatgaaaagtattagacaaaagcagctttcaccaggcctttggccctggtgtcaaccagatggctgtccctaaaccaagcccacagagaaattatggagctgctgctggaagtggcacccacctcacagagctgtcacgatggctcagcgagatgctgcaggtagagtcttcactcagtgcctggcatgcactaagtaagtgctcaataaatgtgacatcgcccacgtccagggctacctcccacactgacttccgcctgccacccaggcttggagccgtctcacacgcccagtgctcagggaataaaagctgactttaatagcccaattccaatagaactgggaaggaaaatttacacatgcacagcacaaactattaaaaaaaagaaaaaaaaagaaaaaacaccagcaaaaatgagccaaagaaaacaaaacaattcctggcctggctgtctggctgtggattatccactgccagggatgctctgccctccctctccccatagctgagcagagaatccgaaactggcaccgtggcgagccacggccatggagtcacaaggagtgtgcatcctcctacatgcacgaggcatgctcagctcttgcctggaaactggcaaatcccacagctcccactactcccaggcaccccagagaggccctaagactggctgcccaactatggaattacagaactacagaacccagttccctagcaccaacaccacccttgccttctgcaagctgggagacacctcactgcctaggggatgcagctggggtgcttgacaccccccctgcccagggctgtctgtctatagcaatcactgccagcaccctccttgcacgccactgctgttcccatctgtctgcatcacctccagccccaccgggaaagcagctgggaaggaggaccttctgtagacaacactgggctgagtgctttcctagttcaggggttcctacagtgggatcctctctagagcgggcagcaagcctgagcccctgcacccctcgtctctcaggaggactacatgtctgagacacggcgccttatggccttgctgtttccgccaaccatggggaacgcactccccgcacagaaggagacacacggggggctacacagccccttcccccagcctcctatctgcccagtgctgaccccaaggcctgtcctagtcctggaccctcctccctagaatttgagcaccacttaccacgttggcttcagacaaggcccctctctatggaggaagcccctgtcaccaagggccagggcacctgcagccacaacagtgcccaagcctgggtcaaccaggaccctggagactctgcaggcagcattagctcctgctggaaaggacacggaaccaggggccacaggcttgggttcaagggcttagtctcctttcccaaatttcattgaaccatcttcaagcttcccgctgagtctccgtattctgtactattaacactttcttgtcaactcagttttttcacttaaatgaatttagcatcatcgtaagtcacaaatgtctataataccacacattagacacataaccatgaaaacattaaatgtttatatacctgatgcctaaccgcgtttctgaaatactgacccagagcaaatctctcttcctgcttcagtttccacaactaaaagaggagaagcttggactgaatgttccctcataggcctcctcaggccttaggattctgcaagactgaagcagctccagctcccccacaaatccagaaaaagctggtcaggatcccagggcaggcctggcccaaggcaggggaggaggacaaggaaggggatcccggcgcctgccggacagggagccaggggcatcactgccaagagaggccctggctgcatgaggagcaaacaggagagcgtgggccctcattcaggagctcccaaagacctctcaaagccagttctaatctcagtactcatgggaaggctccaagctacaaaacttcacagtcagaaaaactttactcatccacctctttttacagctaagaaacagaggtacaggaaagagcttatgcggggatcctgactgtcacgtcacccccgacaccccacgagtctgagctccctctattacctctccctggaggcatgagctcagctctgccagccctgagaatgcagagcagccccttccagggagggaaagaggaattctgatgtagactggagtttaaaagtcctattaaagtggcttttatgcaattagattggaatgaatgtgcagtgacgcccatagcagggagcttcaaggcttgtgcagtgggaaaatcactgcccatctgaactgtagccacaagaaggaaatgtggccctcgggagaataagggaatattagtctccgtatgtaatagattttattgaccatatggaactgatataaaaatcgtgttgcatggggtagtctggattggaggcaggaatgtgacacgaagaatatcatttccataaccagctgggtggctttctgagttcctgggccagcccccaggaccccctgcaactcttccaccagcccccgggcatttacctgctgctgtcacggaggaatcccaggccagcgagaagtctgaggcctccccctcttcaactgaaagagagaacagagatgggcctgtgagtttgaaggctgtacaaatagatcaggtaaggcacagggcgaggaagaaggaacatttgtgggggtccttattataatacccatcaccaggggagagggggcaaagcctacaaagaggcctttattggtttcacagagatgtaaaatgatcggaataaaacaggaatagcaagcaagttaagtgctggatcagttatggtttccccagccctgtgcccctggcagacatcactaatcaatctcagcactgcctcaagaaaccaataaggttgctctcagagatcagcaaagtggtgagtgctcatgaccctgctgagacctgacccacagatagacctcaggacacgctgaggtcaactctcccaatgacagcacgtctgagcactgcaactcatgagctgacaacatcagaaggcaaccagcctcccccccattccacccaggaccccacagaaccaagctgggcagagatagggtgtccccaccatcccacaccccaggacataagcccaggctggtagaggccatgcactaggagaatatgggagaaacactacacagcataacaacactcttgtcctggaattaatcccagtctggggcatgtaataatattaaagctgggttatggactttgtaaatggaactttgtttaagccaaaaatgtgcatacacagtatttttcagatttaatggcctttctagctctgcatatgtgcaggctgaagccaccatgaaccacccagttctctctgcactgtcgatgttcttgctggcaccacgtgggtgcacactgagccaggcactgtgctggggctttgcagccatcactgggtttcgtcttcctcaacggactctcagaggggtgtctgaggtcttacaggtagtgagagccacgaagagtttgggctcaaacccagggttgtctgtctccaaggttgctttgaaaaccactgttgaccggggtacaaaggatgctatccagaaccctagcaactcaggctggagggcagtgaccccaacccaccacatggaaggcatgtacaacacgcaggcagccaccttgcgagtggagcaagcaggctggcttgtggtcagaacctgagttctagcgcaaggcacagcccaccttcaaatctcagctctgcctcttactagctgtatatgacctgagcaaatgatctaacctctgggtttctgttttcccacttcaaaaatggagaaaataacggtacctaagccatagggctgctgggaggattaaatgggataacgtctgtgcagcattgggcactgtgccggcacagggtaactgcccccataataatgtcagggctgtcatctgctagaacagtggcccaaccaaccgagtgggggtcgatgccacaactcaaacagtcctgctctacgtggtgctctacatggtgcaatctacccccttgactatgtaaccatggtcttcctcctccccaaagcctcacagaatgggtttctctgaaccctgagaaacagcacatgcaagagggaacatccacgagcaactagccaaggaatgctaatgaagtgtgctctcttttccaagcccgcatcctgagagtggacaggcaggatcaagacaatgaaatgcacagataatttgagctgggacccaagctattgttttacttagctagttacagctggggtgggttttcaaatgtgcagctttataaatagcaatcaagacctcgtgtcagacaaaattgatattattcactaaaatgattccaaccagacagcctccaaaacatgggtggctaatgcctaaagccatcagaagcgggccatgcacggaaggagctgttgttaacagcattcaatgctatgccaaaaaatcagtttcccttacatttcatcttttacttacacgcacacatgtaaatatatggtgcttctattaagagactgctgccagtgtgcaaggttaccatgctgccattttgttagacaccttccacaaggtctccatgggtccctaaaccttaagaatgacgtaaaggtatatgagctgataaagaggtcagatatgttaaatttgaaagaaaaagcacaaaaaatatgttcagcagaatcccttttgagtgcattaaaaagacatgtccagggccgaacacagtggtttatgcctgtaatctcagcactttgggaggccaaggcaagcagatcacttgaggtcaggagttcgaggccagcttggccaacatggtgaaaccccatctctactaaaaatacaaaacttagccaggcatggtggtgcatgcctgtagtctcagctactcgggaggctaaggcaagagaattgcctgaacctgggagctggagactgcagtgagctgatactgcaccactgctctcagcctgggcacaacagaacgagactccatctcaaaaaaaaaaaaaaaaaaagaaagaaagtggatcggtggttgcctggggctgggaggggtaggaaggtaggggtgatagctaaggatacagagtttctttttgatttttttttctttttcttttattgatttagtcatctgcaggtatcagggcattaatacatgaccccagttctcctctgacctctgtgcacccaggtatcaggacaaatagtctgcacacttacacccactcaaggtggtttagttaagaagtgtgaccacccaagtcactgaacttgaggatgccccaaagatgtcaagtcatcctcttaggaagatctggcctcggccataatgggaaagagaacagggaaacacccaacattttggagctctgggggaaatcaaagctctgtgctgggtcccagaagtccagacaggcctgcaggggtggaaagaggaggaaagtggcccagtgctaactggctggggaggtccagagtggcagatctcactacaggcttcctggtccctcactgcaagcagccgcatgacacaatgcagtccctggaaccacatccctgtgtggtgagggatctgtgggtcaccttacttacgacttgggtgttaatgcgttttcctacaactgcaggcaccaccccactcacatgccctcctctagcccatattctgttttttgaaggtagaagcacaccttcaaaggtgaatatgggctagaggattcaaaaaacagaaaaacaaaaacagaatatgggctagaggattgttttatgagacaggctcatgctctgttgtacaggctggagtgcagtggtgcgatcatagctcacttctcagtcttgacttcctgggctcaagtgatcctcccaccgaagcctcctgcatagctaagactataagcgtgtgccacttcatctggctaatttttttatttttatactttttatagagacaaggtcttgctatgttgctcaggctggtctcaaactcctgggctcaagtgatctccacctcagcctcccaaagcactggggttacaggcatgagccaccacgcctggtttttatacattcttgatgagaaagagtcaacacccaaccccccaccacccccataaggccctgtgctacccagcaatgagtgtgaggtttttttctccccacagctgcactcttctgtccagactggatctccagcaatggcatcactaagcaggggcagcaggcacagaggaaggagggcccgtctgcaactggagctggggacaggtggccccaacccacactggcagcaggcactctctgggggcccaagcagcgagcccccaacatccctaagagggagttctgctgccgagccccactgcacactgaagactcgcagctcagagaaaccccaatccgcacaggggccgatagggacaacacaccaaaggggctacttggccggcccgcggcgcctcctccagacgtccctagctccatgtctagttgtttaatgtatacaataattggccccactgaagccaagagatacacaccccaccctaccccacttcaaggggaacacagtactcctgtggatgatgggcatttgtaaggtaggtgggtggccagggtgtgcccacactggagggtgcacagggtataccggcatagggacagcacgtgaagcaagtgtgtgcacacagagaggaggcatgggggcaagtgtgtgacacagagcagaggcataggggcaagtgtgtgacacagagcggaggcatgagggcaggtgtatgcacacaaggagggcatgcagggtggatgtgaatacacagggagggggcacatggcagagcccgattcaccacgatgctaatgaagccccagctccagagccctttgcaaactcaagcccctctgcacactgggaggggtcccagcagtggggttctgtagccctacatgttttgtaacctttgcaaaggaaagatctgttacctacttaagacctctctgtctctgtctgtctctgtctctctctctctctctctctctctcgctctctgagatggggtctttctctgttgtctaggctggagtgcagtggtgtgatcacagctcactgcaggcacaacctcctggctaaggtgattctcctgcctcagcctcccgagcagctggagccacaggcacatgccaccacgcccggtggatttttgtagttttttttgtttgtttttgtttttgtttttttttttttgtggagacaggtttttgccatgttgcccaggctggtcttgaactcctgacctcaagcaaccctcccaccttggcctcctaaagtgctggggttacaggtgtgagccactgcacctagcccactttttctatctactccaaactctcttccatcccatttcctctcctgtcggtcaccttgagaatggccacaggcattttgcactctttgtctcaaaggactcccccagttgtttcagccatacggccccccacacaagctctgtgctggggccaggcagtggacttcgagtaccctctgttcaagcacacgtgcaggcatgcacacgctcatgtgtgagatgcagaaaggctctggagtggcccaggtcacatggccaggctgcagctgcccactcctgccccatggtctaccagctcctgctcgtgattcccagacctgaccttgcagggcagcttccggcttagcccctgctaacccgaacacctctcattattccttccacctattggtttcctaggcttttatctgcctccctcactagggcatggacaatgcctgtcttgttcattgttgtatcccagtgcctagctcagtgcaaacatagtagcaggtgctcaacaaaaaacaaaaattttatttttggaaacagagtctcactcttgtcacccaggctggggtacaatagtgtgatctcagctcactgcaacctctgcctcccaagcaattctcctgcctcagcctcccgagtagctgggattacaggcgcttatcaccatgcccggctaaattttgtatttgtagtagaaacggggcttcaccatgttagccaggctggtcttgaactcctgacctcaggttatccacctgcctcagcctcccaaagtgctgggattacaggcatgagtcactgcacccggcccaaatttttaatcaataagcacacaggatgtgtggtgacatcccagagggcctgcagcagggatgggctttgttcagaaccaggcagtgggcaaggcagccacagacacacctgtcccctccacgccaccactgtccccaccccatcacactagagtcacaccagctctgggagcagaaggtcacacatgccaatccagctccctcatggcgctcacacttgccccggccttgagcacaaaccactcctgcctggggtcaggcaggcactgaacagaaaactctggccacagaatccagttacagagtggatggagcagggagttcttcctgcccatgcaatgggaatcatcatcgctcatcagagatgggatccttcccagggctgagtgtgacctcaacaatcaggtggccctggaagggcccaagggcaccacagtagccctgcgaggagctcctgctaaaacacttcaccggacagggccttggaggccccgcccccacagggatggagggggctacacagggaggtaggaacgggctcaatcttaagactcccagctgtcctgggataatccccccaagctgtggagactgatgggcaacgtccagcagcctctggacaagggctgctgcagaaagcccttcaaaggagcacccgaacacatcctgttaagagaaagggtgtttgcggccatctctgaagtcctggggggcttccagttccctgtgtgagtcaagatcctcaacaatggacaagaaggggctcaaagaggccagagggcccttagagggcgcctgcttggtggcagcaggtctaagaccagctctcactattaaccatggttcctggggtgcattaagaaggattctggggctctgccagggcttcaggcagatcaggactccacgttgactctcagctctggggtcagaagttgtgggaggctgattgacgaatgggagtatagagctccccctaatgctgtcgccccaactccacagcaggtgcataagtagctacaactctcctgctctgggattggccacagctcgtcccctgtgcactagcacaggccttgccaccaccgagatcccttgtgtgccaggcctctggatttcagatatccagtggcacagagcaagtggcactaggcagacacctgcatgcaccacctcctccaggtcacttgctcctggcctggagagtaatgccctccacccagagggctccccaacacctcacagaggcagaagagatggagctggagagggaaacagaaagggaaggtgaaagctgggcatggggtctggaaaaagggcccagaacacagcagtggggcccagacagggctggggccctgctcaggagtttgtcaaagtcaggcaagatgtgttttggcagagaaggttcaggtcaaaggcaggaaagctcgggggacagattctgaggcagacagtggcaggaggtgaatgagagacaaacagaggctagtgctggtccaagggtcagaggaggcctctagtagggccagggaagaacccagaatgctcctttctgaactccaaaatccatgctggggccacttgctcagcctggcttgaaggctggaagaaggctctgggtgtgagctgctgtgcacaggcacaaaagggcactgttctggggaaaggatccatagatttcatcagaagatctagaaccacctccacccccaaaataactttaagcacccatagaccaatggctctcatttgcaaagtgttctcagctactttccccaaggccttgggaaacctccccatgctttgctggcccgtcccacccttacaacatcccatgcctccccagagacatccctgtcccagcagaggtggtggccaggcaaggggcacgtgactgcccctccttagctcaaccttagggaaaccctctcacacactgcaggccaaggccacaacaggtaaaggggacagcgagagacccaagtctcattgtcaagcatgaaacagagcatcactgcttctgacttactactgagcaacctccaggaatggaaaagcatagaccaggcagggaggccaagcaggtagagcggtataggccaagcactgcacagaaggccaagcaaaggtggcgagaaagagctgaaatgtgacccacactctgtctacccagcactgtgtcctggtgcagggctgtgaatgcccagagaaaggggtgcccattcctttgcacaaaagcatagccaatcacttttctacagcccaagatcatctttggcatcacgctcctaggtcaaatgaccagggtcaagtgcagacaaacccaacgaggaagcccacatcctccaggctcctttcaggtggcgatgtgttcaggcagtgggtggggtgggggtgattgcatgcaaaagccaaggctccctgcagctaaagctaaaaccacccaacacctccactgacaggccccttggcaccaagctcagaccatcagaaaagccacaatatgacagtcacatcacaatcacctttgtttaactcccgtgattcaccctgaccacttgctgaaaagagaacaagctgtttcaacagcacaggtaagatcgcctgccattatgccctgaagtgagagtgaaagggacaggaccctctggctctgtctcatgggtctctctgtccacaccctgccccccaatatatgggcatctcaccaaaaggaggctgggtctagtatttaaagaaaccgattttttaggccaggcacagtcactcacacctatgataccagcactttgggaggccaaggcaggacgattgcttgagccaaggagttccaggccagccagggcaacatagcaagatactatctccataaaaaatttaaaaagtaaccagacatggtggtatgtgcctgtcatcccagcaactcgggaggctgagatgggaggatcacttgagcccaggagttcgaggctgcagtgagctatgatcacatcactgcacttcagcctgggtgatacagcaagaccctatctgttaaaagaagaaagaaggccaggtgcagaggctcatgcctgtaatcccaacacttatggaggctgaggtgggcagatggcttgagctcaggagtttgagaccaacctggccaacataatgaaaccccatctctgctagaaatacaaaaattagctgggtgtgatgatgcacacctataatcccagctactcagaaggctgaggcacaagaattgcctgaacccaggaggcagaggttgcagtgagccaagatcacaccactgcactccagtctgggtgacagagcaagactctgtctcagaaacaaaacaaaataaaaaagaagcctgttttcagacaacacaactcctaaccagaaatcttctaaccaatctagtactttttaaaaataaatacatacaattttttttaaaaaaattaaagcagaatattccaatgtgtgaagaaaaaccattgttaagaattactgatagatggtcagtgggtctccacgtcggcgcttgtataacaggcaattttggcaatgcttgactttctccttaaactgactttagaaccagcacctctggaagctgccacgctactacagactcctcataaactgttgccctggagaattgtaggcagaggggctaaaagcctaaaccttgcttagccactgtgccccttcctctccttgccttgctatatataaaatagaacagaaagacaccagggaataatccaagaattccaaaaagtaaattcatctgtccttacaggaaaagtgacccttgcagaagtcacgcagcagagctcatctagctatggctgtgaggtagaggagggaacctggagagacactataaaatgtaggggtgtgggaagtgggctctggaataggctgctgtcccccaagtgatcacttgcaggccatcagatctcaggccagagactcgatccaccctgatcttctgtctctgtaaaatggggataatcagaataccaacctcgcaggaggttggagaggaccaaatgagatgataccccaaagcacttagctccagggaaacatgcaatcaatgtgagctcatgttactgggataattcaagctccccttctcccgccaggttcctggctggctgctgaggtttcactctccctggaaagacaggagagctgagttttgagcagtgagatcaaatttcccactgcgatttagcccaccccgccccacccacaggaatgcccagctagagccacagatgcctcagcatcactgctttcctgttcccactacagtgcagggatggtgtccctaaatgtgggactatttggaggtgacagccaaggggctcagcttctgtgccagctcatctccctctcaccctcctattccccatgatcaccccaaaagagaaaggctaggagatctctgcagaagaagcagacactaaccccagtaaaatctatatcttcggcaactctgcagaaaggtgactcctctcctccatctttccctaataaaaacatgatgatgatgatgatgtgtaaaataggacaatgagtgtgaaacacttgaagttttctttgttttgttttggtttattttattttttaagacaggttctcactgtgtcattcaggctggagtgcaatggtaacatcttggctcactgcggcctcaaactcctgggctcaagggatcctcctgcctcagcctcctgcgtagctaggaccacaagcacgcaccattactcctggttaattgttatatttttctggccaagcgtgggagctcacacctataatcccagcactttgggaagcagatcacttgaggctaggagttcgagaccagcctggccaacatggcaaaaccctgtctctacaaaaaatgcaaaaattagctgggcatatggatgcacacttgtaatcccagctacttgaaaggctgagatatgagatgcacttgaccctgggaggcaggggttgcagtgagcagagattgtgccactgcactccaacctgggtgacagaatgaggctctgtctcaaaaaaaaaaaaaaagatatttttctgtagagatggggtctcactatgttgcccagactggtctcaaactcctggcctcacatgatcctccctccttgggagttttctctaagtactaggaaaagggtttttccactagacccaggacagcacacatgtggaacacctgccccagctcctctatcttgcacccaccatagatattgccaactgatcggggttctttctctaaattggcacagatgcagcttcaaaagtctcaacagcgagggttaaaatcttgggtttctctgttctggtccatagaacttccctgcaagcacctggacatgacacacacacacacacacacacactcctgcgcacacacttgaggatgtgcccaatgtgagcaggaaaggccacccttcactgagcccaagtggcatctggcacagtgccgggtatcccacatactggctccccttccatcctcccaggccccctcagagggagcccttaaaatcctcacttttctggtgaggaaacaaagccccagggagccacagcatttgtccagatgccagccacggaatcccaggccagggcagatgtttccaagcatggcttcagctcaaaggcaaaacagggaagggaaggaaaaaggggagccgtgaacacccagccattcacccctcgttctgtcctggtccagcccagccatggggtaggaaaagaaaaggaaactgaatatcacaaagccacctgatgtggcaatgttagtggaaagccagaatcaggaactgagaagaactgaagacaacatcgcaaaggcaggaacccacgtgaattaaaacaatgtcttttttcttcttctaaaacagtccctcgcagctctgtcagaagaggagccaagcctgggtacgttggcagccccgggggactgaggagagcgtgccctgccacagcctgcctctctgtgctggtcccacgtgggtgaggagacagacgccagcctggcccaggtccctcacgtccttccccaccaccctgcaccagaactgtctggcactggaggcttttacagatgtttcctcagctcctgcctgaaagtcagggctttactgacccatttcaaagaaggaagaatagagtcccaaataagagaaatagctcacctgggggcccagacgaggcggcaaaagcagactcagaacccggcattctagctttcaggccctggaatactcctggacaatgctgcccacctctgaataagcagtgaagtgcaactgagccctcacctgtgccacacactgtgatgtgcacttcggttgcacaaagtaattctcagaatatagtttccagaccagcaatagcagcattacctaggagcttgttggaaatgcagaatcccagaccccatcccagacctacaaaatcagaatatctgagggtgggactcaggaatctgtgtttttgcaaaaccaacaaatgactttgatgcgtgcttaagtttgagaacctatgagtaagtacatttattaaccccattttacagatgagaaaactaaggttaagcaatttgtcaaaagtcatggagctaggatggggtatagccaggactggatttttatttttttagagatacagccttgttctgttacccaggctggagtgcggtggtgtgatcagagctcactgcagcctcaaactcctgggctcaagtgatcctcccacttcagccccccaagtagctgagactagaggaacatgccattatacccagtcagttaatttttaatttttttcagatgcgtctcactgtgtggccaggctggtcttgaactcctggcctcaagcaatcctcccgcctcagcctcccaaagtgctgggattacaggagtgagccaccatgcccagctgggagtagaattcttaaccccttgattttacttcggcctccaacaggcagcaggtctggttccagattgagtaggatcagtcaacataggactggactctcactctctctcactctgccccgctcccatgatccttaagatccttaggtccctccctgtgccagccccaggagaccctaagaagaggagagttcatctcttgggtctccctaagcactcaaggtccttggggtgaaaccatgagagacaatggtgtgctggtcaatgtctaacagggggctatccaggagaacaagaggctctggtttgtagggtttgccactttctgcagtgtaaatgcccccactgcagccaacatcaagctaccaaacaggacactgctgagcagaataaatgtgcacgatcagcgcaccatgggacaaaggcacagtgtcacaggaggaggaggaaggagagaaggggctttggcagcctaggacgctgcagagaccccagctctcccacccaccccacctgccctgcctaggctttgcccctatgttccaaatatgtcagaaacacagaattcactccaagtggccctttgcttattgtttcctagaacaaacgtctctttctttctgtaaaagtttctgacataagtaatccatgtacaacgtagaaaactagggaatacatgtgagttaaaatgaagaaagtaaaagcacaactttccagtatgtaaatacattgttacaacattaaaaacaggtagtgctctgtattccgcttttctaactcagcagtacccagtgaacatcctttcacatcaaaaacagagaccaaggaccagcccgatggctcacacttgcaattccagggttttgggaggccaaggtgggaggatcacttgaggccaggagttcgagaccagcctaggcaacatatcgagattccgtctctacagaaaaataaaaaaaaaattagctgggcatggtggcatgcatgtgtagtcgcagctactcaggaggctgaggcaggaggatcacttgagcccaggaagtcaaggctgcagtgagttatgatggcaccactgcactctagcctgagtgacacagccagaccttgtctcaaaaaaataaaaaataaaaataaacggagaccaacactattatcaatgatggcctgagtcccatcacaggaggctccaaataaccaatatcctgttgctggatagccaggctatttccagctgtctcctcctgtaagagaatccacgctgcaacacatgtatggtcacaagcctgttcgataatattccttaggtcagaagcttgattgctaggacaaagagtgtacccatttttaggcttttgggatacactaccaggaggcatttggctatttcctcctttaacaagcactgagcacctctagactacctagaagtctgcgctaggtagcatgagagagatgagaaaaggaagctgggttttgaccttcaaccactagatggtgaatccacagtgacaagtgttacccatcactgtgccccttcaagggctggcacacaggagctgagtgagtgaatgaatgaacaaactacggtatgctggaggttgctaaatgcatcccaaactcagaacaagacaaaaccaagtagaggacctggagtgcagacacaagggaggggcagggagctagggaaggggaaaggcagagctcaaggtggggtctctgtctccatagccatagccccagagcagactcaggggtggggaaccggcccagggctaggatgagtttcttttttttttttttttttttttgacagagtctccctctgtcacccaggctggagtgcagtggtgagatctcgactcactgcatcctccacctcccggattcaagtgattctcctgcctcagcctccccagtaactgagattacagatgcccgccactacgcccagctaattttgtatttttagtagagatggggtttcaccatgttggctaggctggtcttgaactcctgacctcaggtgatctgcccatctcggcctcccaaagtgctgggattacaggcctgaggcactgcgccccgccttcagatgagtttctacttcaatcagagttaaaattctgatttttttacactaatatgcaaatcccattttcaggaagaatgataattgtggacaaaatcttaaaagtccatgggtctcttttttaatgtaagcaagttttcctgctcaaaagtaaagttcagaaaaaaatctaatcaaattgaatttaactaagcaaagaaatcaatactagaggaaatctaggtagcctcgccccacccagtctagcatcacctgggatccggcttatgaggagacctgggaacaggcccagggcttccagcttctcatccatgtccccagagtcagcctgaccacaggctacaaggccacctcctctcctggtcagaaacactgaccagagctcaaggtcacctcctccaagaagtcttctccagccatggactgaagttagttctcacctgcagcagggtgtaattgaagcaagatgccttaggatcaaatcccaatccaccatattttgctgtgtgacttgggcaaatcaggtaacacaccaaccctgtgcacaccaaccctgcaaggtagctctgaagatcaaacaagatggtgtgtataaagtgcatggttcaggacccaatacccagtgcctggcaaatggaaaccctgatcccacagcttttttttttttttttttttttgagacagagtcttacttactctgtcccccaggctggagtgcagtggcctggtctcgactcattgcaacctccacctcctgggttcaagcaattctcctgcctcagcctcccaagtagctgggattacaggtgcccaccaccgcacccagctaatttttgtatatttagtagagatggggtttcactatgctggccagaactggtctcgaactcctgacctcaggtgatccacctgcctcagcctcccaagatcccacagcattatatgttgcccacaaccatactctcagcccctttagggaaagtctctccatctcctctttctcccaccttccagttcacttggcagcagactgtgcacatcagagacactagagacaaccatcacatacctgtagtgagaacacactgagccacctcttcacacgttaccacgttcatgctgatactcccaatggccctacaaaagcaggtactcatcttacaggtggaaaaaccaggggctaaactaatttttttaagtggaccaaattatggaagcagagggagatggagcccagatttgaagctgggtctacatggctctgaagttcaccaggccatcctgcctctctcggccccttcaaaacaaacagtaattaactggccaaacttcccagattgcctgtaccttctcaaaataaggcaaagctcgccaggcaggtaagggttgaaatgactccttttttctgaaccctccagtgaccagtctgcagaggtcagtattgggtgtgccagcccacgttgatcataaactccacctgttgcttgctgtgtaaccttgggtaatggactcttcgagtctttatttccacatctataaaatggggatttaaaaaattccatttattttaaagacaaagtgaaataacacaggtaaagatctcagcttagtgcctggcgtccaacgagcaacacgaaataggatgattgcttctgtgcccccagccagtccatccagggttgcaatgtgtgcggaaaattccctttctggggaaccgcctgcctggaccttaacagggagggcccccggcctcccgggctgccctctcgtttaatcccatctctccctgaggttaatctcctcgttcatacatgtatttcatttcatacagtcatctctgcatggtctcgttaaccagaaacgtgcagcatataaacgtggatttacaatggggtctggctcctgcatcctgtttcgggggcaacactgggctctcgcccaccagctgggaaatgctgatggaaggtggtggagcggggggcaccccagccccccagggaggggccacacaacagcccacacaaccgccagatgaaagtggcagcctgtacttcaggaacctgacagtgggcacatcagcctggggcccagcccctcactcagggtatggtacagaggacccacatctgcccaggtctgtttgctgtttcgggtggaaaggaagaagcaggtaagatcggcaccccactctctttccttctttccactttcatttgaagaaaaagcactataaagtagaaactaatgtttttttacaaccccttaacagcttgtcctctgtgctaacatactgtaaataaatgtcagttcctggttatacatgtggtttattttaaacacgagcagaggaaactgagtctgtcattgaaaactgatttgtgtatgtatgacgtgtgtgtgtgtgcttccatctggttctgaacacacagatcacccatccatctctctttttacacattgctcttcttcctcatactttttttgtggttaaaaaaaaaaaatgcacagcaggccaggcgctgtgactcacgcctgtaatcccagcactttgggaggccaaggcaggcagatcacaaggtcaggagttcaagaccagcctggacaacatggtgaaaccccgtctctactaaaaatacaaaaatcagctgggtatggtagcgcacgtctgtaatcccagctactggggaggctgaggcaggagaatcgcttgaacccgggaggtagaggttgcagcgagccgagatcgtgccattgcactccagcctggaggacagagcaagactctgactccaaaaaaaaaaaaaaagtgcacagcataaaatgtaccattttagcaatgttaaacatacactacagcagtactaactccacacacattatcttccttctctttcatattaaaagcccaagccaggccgggggcggtggctcacgcctgtaattccagcactttgggaggctgaggcaggcggatcatgaggtcaggagatcgagaccatcctggctaatgcggtgaaaccccatctctactaaaaatacaaaaaattagccgggcgtggtggcgggcacctgtagtcctagctactcgggaggctgaggcaggagaatggcgtgaacccgggaggcagagcttgcagtgagtggagatagcccactgcactccagcctaggcgacagagcaatattccgtctcaaaaaaaaaacaaaaaatacaaaataaaagcccaaaccttccacagaaacgaactgtaatgtctggttccaaacactttttcattccacaaagacaccccggggtaggggcaagcacaatacttcacggcttaaggagtttgtatttttaatgtctgatttgggagggggacatttcactggcacagatgtgctcccgacttggccccattgcccacccaccgtggggagcttgcatgtggaaaaggcctttgggggaccccaggcagctccacctggcagctggtcccaccaaggcaggccctccctaatccaaacctgcctgccatcccaagacaaccccaaaaccttcactaagcatgccaaccatcccaggggccgtgacagggtctgcctgggcacaggctccagagcagcaactcagcctctccactgtccctgccccggggctggcagggacctccccagacaactcctgccaggaggacacacctctggcactcagagtcacgggatgcttttcttcccatcaactccctgctttttcttacattcctttttttctagcttctccctaagcagcgttactcaagaaatcacacatttggtgtgctagtaacaatttttctttctttttttttttcttttatagggacaaaatcttgctctgtcaccaaggctggagtgcagtggctgcatcatagctaagtgcagcttcgagctcctgggctcaaaccatcctcccaccatagcctcctgagtagctgggactacagatgtgcactaccacacctacctaattttttaattttttgtagagacagggttttaccatgttgtctaggctggtcttgaactcctggcctcaagcaattctcctgccttggcccctggaagcactgggattacagatgtgagccattatgccaggcccaatttttctaatagacaataaaataaacataagaagtaacatgttcctaacagatgaaggaataaatatatataagtatgaagaaaagagaaccattcacctatcagccacctgaatcccacaagcctccggtgcaatgtcccattttggggacagtgggcatgagaagtgctgggcacctctgataaagaggtgcatgtcagttgtcctaaatggatctccgggaacccactcagcccactggagttcagcaagggctgagtgttgcatgccaagggcagtgctgggcagaggacagtgggaggggcgggggacatgctggctacacactctggcaagcagtgaagtactcccaaaacctgtggctcatccaccccccagggccgttagcagaggggtggagaggggtggaaatcacgacaagtgtgactatttcccaagtgcacctgaccacctgcccccatggcccagggactccagctgtgcattccctacgcacaccagacagggccagagagacccaccaggctgcggcaaggctcaggggaagccaagccagaagacacggcctcagaaaggttcagcaatgggaaaggataccactgagggccagagcccctggcaggaggcacgtccccgagcagggggcacactgagcccttcctgccccaaccacatctgtctcatcccatagccctgcacggccccacacttgccagatgtggccacccgtagggaccaagttcattttccgcgtgtcctgcgataatacttggttgtgtttatttaactttctgcttcgaatggcggagagatgggccaggaaaatcagtttggctcccttcgatcaaaacatagcggcccacacataatgcgaggacacccacacagagaagctctcccacaccatcagaaaaagcacatctggtccacggctggcaggggccggcccggccctgggggcccttggaaaagctgcctcgtgcaaagcggcataggctgcagtggtcccatgctctgtgtgtcacccacactgctatgctccagcgggcggcagcaggttcaatctccccacccaggcagagaggtctcagagaagccttgtgttccactacacacaagccagtgcagcctgtgtgtagtggaactcacacccaggtcctgctggtcctggaacccccaagaaggcgagagggggactttggggaaaaggagaatccgagagaaaggtcccagaggctccgctctgcacctgcgagaacagatgtggctgcctcatcctcccatagcagaccacatgctggctcccagaggggagaggtggggacccccgggtgggttagcacagctggtaaaagcattcctgctcccacttctgatggcctccaaagtgcctccaccaagccctgaggcatctgaagcctgctcctgagactggaaacaaagacaccagggggtctggggctggagggtccacccgggagctcttagcaggacaccaggggaagccttatgaaccgcatgagagtgagagctcgcccagctgtcaggacccaggcccccagcctgcgcccacccattttttcctcccacccccagctccttccctcgaggacaggggcaaccatgtgtcaaaggtctgcccaggccccatttcctgctgacagcaccccttccccactctttggcctggggatatgcacactgaaggcttggtccacccttgggaagacaaacacagggagaggccccagaggtccagggtggtctggggtcggggaggctgggggagtcctggcacctggagataatctagaagaaagaacacgttcccagactcacagactcctcaccccaaagaggacagccagagaggggcctctgccagccccttgcccccagccctgccacacacccttcttacctcctgatgctccaagccatgcacccacctgctcccttccaggcaaccaccttcctgtctcaggacctctgccactgctgctctcattacccaaaacacccctgccatgttggaggcccccaccagacctctgctatccaagaggccttcccagatccctggataaacagacgcctccttctctggtccccataatcctctctgagggcccgactcagctgagacccctgggcgcatcagggtcccctatgctgtgagctccctgagggacagccccaccctgttcctcctccttgcccctcactcccagctcagggcctcgtctccacagacaactgccatgagttgattaaaatgaattcatcgcaagccctttgctttgttacttttttaatcttccagattataggaaaaataaataaatacaggtgagtactcagggaaaaataaaaccacctataatgcccctctcggaaatgccatgggtatttgagggcagtcggccctaccggacactttctgtgcatttacactttctctccttcaacacaaatgggacctggggcatgtctgagtggtcttgaggccctcggggtgtgcagggcagcgctgagagtccggccacaagaagttcacgggcccacgaggatgtggctaaggaggggcatcagggtaatggggggtcttgaaaccacatcttgggaggggaagtgaaggaactgatgctgttcagcccagaggggcaggctcagggggccctcagagctgtcttcaggcatctgaagggctgtcacagagaagacagactgcgctggctgtgtggcctcaaggggtcaaaccgggaccaaccagtggaaggcactacagaaagatttcaagaagaaacagatgggacgatttcaagaagaaacagatgggacgctatcagcagaggcaatgaggggaggtctgcttgggggtagtgaggctcccggcatgggaggggaccaagcagcggtagagagacccccaagaaagtcaaggctcagctaggagaggagttagagttggccttgatgggatctcaaatgatcgcaggggaaataggtaggtaccagaaataaacactgggggtggaggagacaatggcaccactctacccccaacccagcccacgctgccacccagagtgtgcttagcagggtcccattttctggtttctccagggaggccagagatctgaatatttataggaaccattccaattttaagacaggctgaccaaacttctagcagtccaaatacagtccttgcactgcaggctgccgaccccctggtcagacaaggagctcacagggcaaacgaggctactgaaagaaaagggagccatttccgggcccagaagagcagccatccccgcaggactggaatgggttaaagtctgagttggctctctgctgctccaggactacagctggcctcctacccccacccccgcccccagaggccctgtcagctgcccaggccccgcctgaccgcccgcctcagccacccagcctggaaccccagatctgggaacagggcagctgccctgaggctggccagccaccgccagccagaaagagattccgttccccatgccctgctgagagccatttgctcatctgggatggatgccacaggggcagagaagcaggctctgtcccgctctcctctccccttcctcctgcccctaggcctgtgacagggagcagacctctggtgccaccacaatcaaaactccgctgagcaccggtgactaggcggggtgctccacacacagagcacttgtgtcaccttcctagggatcctgcagggagtcctcaaccatcctcattgcacaggcaagaaaacctatactcagagaggttaagacacttgctcacggtcacacagccagcaagtggcagagctgggattcaaatccagacctatgcaatttaaaatcccacaccaagccactgggctagagggtcctggctctcccacatccacattccccatctacctggttgttttctagaagctacaggcacctgctgcctggctggctatgagaggggagagagggcatagtcaacgctactgataaaggctgggataagggggctgggcatggtggctcacgcctgtaatcccagcactctaggaggccaaagtgggtggatctttggaggcccaggagttcaagaccagcccaggcaacatgatgagcacatctctacaaaaaatacaaaaattagccaggtgtggtggcatgcgctactcaggaggctaaggtgggaggatctcctgagcctgtgagttctaggttgtagtgagctgtgattgtgccactgcactccagcctgggcaacagcgtgagatcccatctcagaaaacctaaataaatgaataaataaagtcctgaagcagtactgaagtagctgatttggaatcatttctcacagtctggaaagtgagaaagggtgaggggctgtatggtgtacttccatttgtgttggggaggggagataaatacacgaattttcatgtgtctgaacacacgtaaattgccctggaaccagacacaagaaactaggaccagcagtggcctccagggaggacagtgggtggctgggggagtttctaattttgctccttgtgcattcattagcaattcgtgtgtttaaaagtgtgtgtgtgttctacttaaaccccctgccacaccaccaggggcacccacacttgccttggggtgctgcatttttgccttcccaccttggtccactcccctagttgtagccctactaggcggtggggctttggggaagttcttgctgctctctctcaactcccatttccctgtgcgtatgaatgacattagactggacttcccccaaatccccacccaccctggtgccctacaggtctaccttggtgactccaaccccacagcccagagctggcctaacaggcaacggcgcacttcacccccagcccaccctgtgccccgactccaggcagccagagccttctgaggtggcaggacaggccaccaggagagcagtgacagccaagcagacatgttcatcctccaggtatccactgccccagcctcggataacagcagcaccccaatcgtgccctgaggaaccgcccctaaccctaacctcaatgtgccaccagtcaaaatgccctgccctcccctgggccatggcccaggctcatgcttgatctgcccagggattgatcctcaagcagagccacgcaggagacacgggaggtgacaaactcccgccccatggcagttcccggaagagaacatccattccctctcgctcccgcatctccagagctgccccaaggcctccatctctctgtgcattcacactgttggctcccccttggcctcctgttaaagtctcttttggcttaagttgtccagagttggcttctgtcacctgcaccactgaaccctgctggacaggaaaccagcacagtggccgagacagcagctgagaccatggagatggtcctgccattgcagctgactcagaagccacccaggaaaggccaaaagctctttggacaggggccaggggtccacatccgccccccaactcctataaatgccttggagaaccgggaggccccaggtgggctcctgcagaagaagctggaaaaagaaaacaagcagctccttcctcaaggacgttagcaggatttgccgaactcccactttttactcctggaaagcccagaggacgcaggaagtgacagttccagggaaggcgtgaggtcgaaggctgtgggctgccagggtccaagagccaggccctgaggagccggggcttcggagacagaaggccctgggtcaaggccacaagcccagccctcagcagcagtgggactccagacggggcctgtaatactgaaccttttcaggcatcacctgtaaaatggacatgattcatctgccttcccgtgggctctggggggtggggggatgacatccccgacatgtcctgtgcccaggatagactgcacctaccctttccaacaatggggcaggatcggagggcaagcaggacaggggtgggctgtgccaggatagactgcacctgccctttccaacaatgggacaggatcggagggcaagcgggacaggggtgggctgtgccaggataaactgcacctgccttttccaacaatgggacaggatcggagggcaagcaggacaggcatgggctgtgctttctcaggtgggcaactgaggctcagacaggaaacacgcttgttcctgagaagtacaaaattactccaatcctccaaggtcctcctgaacaacctaatcaattggcttgctataagatttgttccagaaaagttttgcaagccactattgtaaaaaaaaaaaaaattaatccgcaatgagtttacagctcgacaggcctagcaccccatttatctacctcattcaaacccaggagcatgacccaaaacagggctctgataggggtgagcctggcatgtgagcagggagccaggaggaggtggcatcccccaccccaggagtgtggatggccagcaagacggaggcgacaggaggcggtcaggtctcttctgaagcagccccagagcactggccatctcaactctgcagcgggcatctctcctgacctcctctttcccacacgtgtgtcctagaatgccacctcccaagccacgtcggggagggcagcctgctggttagggcctcagggtctgggatgaaaccaaccaggctcacagcggggctcggccgctcatcagctgtgtgaacttcggcaagttactcagactctcagaacttgagtttcttatcagtaaaatgggtcaaagagggcctaccttagtgggagaataggctgctcagtaaatttggccattcttattaataacactattattttccctttcctgccctgatacccccagctgctccaccaaaacgaaccaaaaaaagcagccccctaagcagcagctgcacaaagatctcgatacggggtcaggacaggaagttatctgggagttccctaactttccatgagaaatctaaggcacagacctcattcacaagggaagtagggggcctggcacctgcttctgcttcatcaggcacagtgggaaactgccaactcagtctagtgccccactggacagatgggaaagctgaggcacagggaagtggtatgacgggtgccaagtcacacagcaaacaggaggcagggctggtccaggagctccaggcagactctggcagggcagcactgcccagctctttcaatcctcggagtactggcaaccttgaggccttcagggccagccaggtaacattaaagggtaaggaaggcttgatgcacacaacagggagtcataggtacgaggaacagagcacgcaggcttgggtataagcaggcagcaccagcccatcctcactgtacaggaacttgatctcctgattgctttgaagaacagctagaaatctggatttttgtgcatactttcctgaattttaagtgttacattctaattccaaacaaacaaaaaaaaaaaatatatatatatatatatatatatatatatatattttttttttttttttttttttgagacaaagtctcactctgttgcccaggctggagtgcagtggtacaatctcagctcaccgcaaacttcacctcccaggctcaggcgattctcctgcctcagcctcctgggtagctggaattacaagcgcccgccactacgccgggctaatttttgtatttttagtggaggcaggatttcaccatgttggccaggctggtcttgaactcctgggctcccacgatccacctgctttggcttcccaaagtgctgggattgcaggcgtgagccactgtgcctagccaaaaacaaattttaatcctgagcagccaagaaaacaaaatgatcctgacactggatgcgctcctcgggttcccagactgcaaccttcccccaggatttcaaagcaggtcctgagtatttttgtttgtttgttttgtcattgagctaaaatgacatgagaggtgcttggaaagtacttttccctataaagcaatgtcttgcccaggtgactaaaattccaccattagctactaattccttttagtcaaacagtgctctccctggatattcttttaaaaagaagattcaggcaggatgcagtggttcatgcctgtaatcccaacattttggaagactgaggaaggaggattgcctgagcccaggagttgccagcctaagcaacatagtgaggccccatctctactaaaaatttaaaaattagccaggcatggtggcacgcacctgtagtcccagctactggggaggctgaggtgggaggattgcttgagcctgggaggttgaggctgcagtgagctataatcatgccactgcactccagcctgggtgacagagcgagaccctgtctcaaaaaaaaggaagattccaaagcgtttattgtaaatgtcttagtctagaggagaggcctaagcaatgcttcagtcctggaaaaacaaagtaataataataacaataacggtagcaataactaacctatactgagcaatcagtatgctcaaggcaccatcccaagtactgaggacacagttgactgcaaaggcttttgagagggtgaagaaaagcatgtgtctattttagataagaagctgctaatatctccccaaaataccactcccaaggctgagatcagacacttggtgtctttccagcagagaagcatcgccacatttgccatctcgaaataagtctggcatcttccatggacaaaacttttggctgccaagtagctggggcacgcctgaggctctggccacctgacgtcctagagggagggccttgcacggagtcctagcagcggagaggggagagcagggggaggcaggggaaagtttacctcgacacttttccctaaaatgctgatcttaggtctagacaacagaaaagatgctgctaaaattactatgaagtctttccccaaaaggcatttggttacatctgattttaacgtgcacttgcagaagtccactctctgggcccatcctgggcttccagatgagggtctggaaagggcccctgagattataaacccaataaaagagacgcagaggcctggggaggactttccaggaaggaaatgcagagcagcaacaggaacacaggtcccatcagaccagggtgcgggtccagagccacacagaacgcctgataccgccttagcctgattgaggacagctggggagagtggtgctgggcaggaggtgctcaggcagagctgagaccctgaaggtaggagaaatggggacagtgcagttagagaacaaagaaaactcagtaagaaacaagaccaccatgtcacttatcccagggtttctgttgtgcacatgcatgctttgtccatgcagtttgagtctatccatcttttgaccctactagatgagtgtgtcgcaaggtgtggttagctccattttatcaatgaagagaatacgaggcccagagaggttaagacaccatttcaggatcacacagctgcagtaccaggcctccaacccgccagttcacaaatgctccatctcttcgctccaacattctgaccttttttgagttcgtcaactgtgccaagccctccccactgctgggcatggtgagctgtattccatcaccaccaaaggcccatccagtgccaggcctgccatggtcacctcgctactcatgtctcagtcacagctcatcagtcctttttctcagaaggcttctgtgcagttgaaatctaattcccctactccttgatgcaccgccccccagaatggatcgcatgatagcatcacacccacacctacctttcctagagcaaagccatataaaaatacctggagggattgctgaaactcagatgcccgggcgcccacagagattctgactcagcagaacctggatagggcccggggatctgcattgctaccaagttcccaggtgaggctgaccccatgctgtccaatacagtcgctactaccctcatgtgagtatttaaataaaaattaaccaaaagtaaatcaaactgggcatggtggtgcatgcatatagtcccagctactcgggaggctgaggcagcaggatcactggagcccaggagttcaagtctatagtgcgctgtgactgcacctgtgtatagacactgcactccagcctgggcaacacagagataccccatgtctaaaaataaataaaaaagaactgggtgcagtggctctcacctgtaatcccagctactctggaggctgatgtgggaggatcccttgaggctaagagttcaagacctacctgggcaaaatagagagatctcatctcttaaaatataaaaataaattagctgagtgtgatggtgaacgcctgtagtcccagctactccagaggctgagatgagaggatcacttgagcccaggagttcaaaactacaatgagctgtaaccatgccagtgtactccagcttgggcaacagggcaagaccctgtctctaaaaaaataataataataaatacatattgttaaaataaatatttttaatttttttaactaaatcaaatttaaaatggcagctctggccgggtgcagtggctcatgcctgtaatcccagctctttgggaggctgaggccggtggattacgaggtcaagagatagagaccatcctggccaaatggtgaaaccccgtctctactaaaaatacaaaaaaattagccgggcgtggtagtgggtgcctgtagtcctagctactcgggaggctgaggcagaatggcgtgaacccgggaggcggagcttgcagtgagcagagatcgtgccactgcactccagcctgggtgacagagtgagattccgtctcaaaaaaaaaaaaaaaaaaaatggcagttcctcagtcccactagccaggtttcaaatgctcaaaacccatatgtggctagtggctaccatattggacagtacagatatagaatatttccatcttcaccaaaaggtctattggacagcactggtctagactctagagcacatgttactgttagtaatcataggctcatccacgagtatctttttttttgagacagaatctcactctgtcacccaggctggagtgcagtgatgtgatctcagctcactgcaacctccgcctcctaggttcaagcgattctccctgcctcagcctcccaagtagctgggattacaggcacccaccactttgcctggctaatttttgtatttttagtagagacagtgtttcaccatgttggccgggctggtctcaaactcctgacctcaggtgatccacccgccttggcctcccaaagtgctagattacaggaatgagcccatccatgagtatctgattacagatggtccctgacttaaagtgtttagacgtgcaatggttcaacctcacaatggtatgaaagcaacacacatttagtagaaactgtacttcagtacagtactcaataaattacatgagatattcttccctttattataaaataggctttgtgttagattagtttgcccaactgtaggctaatgtaggtgttccaagtatgttaagataagctcgctaagccctgatgtttgtaggttaggagtattattaaaggtatatttgttgaataggtggatggatggatggatggatggatggatggatggatggatggatgcatggatggatgggtggatggatgaatggatggacagatggatggacagacggacggacggacagacagatgaatggaaggatggacagtgagctgaatggcaagaactccgaaaggggcagagactcccagtggcctaactcctcttgaaggcagaccccctacctcccttgattgacctgctagagcatgaaccctctgcttaatcccatagcccctgccccaagatatgagcagcagaggaatatccgctaggccttggataaccatgtcctgcttaaccaagaggaagctctgttggaaaagaaagtcaatgctaaaatgcctttactattttcagttcttggatacctagcaaacaagagctgacaatctgactttaatagctccagttctgagtgtcttaaagacatttctttccaactaagtaacccaaataaatttagctacatttttttaataaggagaaataattaaagaacagatggtgttgcttactttgaaatttttgctctaaaatagattttgtgtgcaccttggttggagttcaactctccccctcccccttgcattcgtgtgtcaggaaaggagatcagttcactaattacctggctgtcttttccctacaagatcccaatttaagaatctcgtttcattctaagaaaattaattcaaaatgccaaataatttaaaaatgtattaagattccccttagactagaaagcaaaaaggagctttcatttgtctgttaaaaatcaccttgggtagtagattgaagtttagctcttaagacttgatccccacaattgggcttttggcaaaagctatgggttccatatgtccacaaaatgtttcatttaaaatatatgtgcttttaaattggtctctgaccatttctatgccacagtctctaactgctccacgcattttcccaacccttggagccttgttcgcctcggaagctagactcttttatttgcattggaggtaacctatttccagcatgccaaaacctgttcactttcaaagccacttttggagattttatagcctgaaatggaataaaatttaaatttaataaaatttgagacctgaacaagaaaaaaaagaaaaactgaacgggtttaaaagccagctacccagacgcggaggaaaatattctaagaaaaccccacagggtggtggggcgggggcaggggcggggggcgatggggagccagaccatggatagcctgccaaatgtcatctggggctggctttagaagagaaccagagctggggaggcaatgcaattatttaaatccagaaagaaaaatgtttgctcccaaatttggcagcagatgattgcctctgattcttcccatttccaactgattccatgcaagcttaagtggaggaagcttcaggcccagaagaacgcacaggatgagggtcccacacctgggctcgaggcgtggtctgcaaagtgaaaagtcctgctctgtgaccagatgaacggagggtctcactctaaggccttcaggggtggcaaagcacatttttctttaaaccacaggttgtaacaagaagagatttctctcttcctttgtttctccctgtctctgcctttgtccctgcctggcagccccctcctctgcccctgctgctctctttttccctcccccggtgtgtgcgaaggccgagcctggctgtcactcaggcccttctgtgggcccagggaaggaggccacacggggctccccaggcctcagggtatttattaccacccccgacagcccagaccctctgcagcctccaaggctgtgctcaaaggcggtgaggtctgctgtgcacaaccatgaaagggcctctgggggatgcattcaatgcctccagttgggtcttcctctctctcccggagaaggttcaatcacttccacatccctatcctgctagaggaaagagctgggaaagccgaagatgagtaagaagaaacactccagcagtccctggttggctggtgaattccaacagcacgtgggcaggatctcctgatacaggagactgtgggagtatttgggctgaaatgacaacccgtttgcctaagtcacccccgcaggaattttttttttttttttctgaaatggagtctctctctgttgcccaggctggagtgcagtggcgtgatttcagcttgctgtgacctccgcctcccaggttcaagtgattctcacgcctcagcctcccaagtagctgggattacaggtgcccaccaccacgcctggctaatttttgtgtttttagtagagacagggagtcatcatgttggccaagttggtctcgaactcctgacctcaggcgatccacctgcctcaacctcccaaaatgttgggattacaggcatgagccaccacatccggccccctgcaggaatttttaaatccaagttagatggggtcaagatgatgttgctccttcatcctccccaggcaaggcccctagctgagtcagaagggatgagacccacattgtccaagagaactaagctctagttcgagctccttctgtctgcctacttcccttgccccacccctcagcccaaggcctcccctgctcacccctcttcttatgcatccatgtctttcttcttttacagggtaaaatccatccttctccaggaagttttcctgggggaataaatacaaaatttcttattgcaggctagtaagcatgtgcaatctcctggtgaaataacacttgtatacccatttgacagatgagcaaactgaggctcagactacttaacgacttgcccaggtagtcatctacgcagccaggatttaactgcttttccagatacacaagtgaattttcaaagcctctggatggctgatcccctgtcttgagcaaggtccttccctggggtatggcccagaggtcaggataggaggccctaaggcatcctcaccttctcttcagaccaccctggtgactaatgactctgggcaaagcagagaggcccgagtcggggacaaggcctgtgatcgaccttgaacttaagaagctccaagctctcaccagcgatgctaatgggccaggagtaacctgagccagcccttggatggaaactcaagccattatgcctggctggcctgctggtcggctggcatcactacctggacagaagcctcacttctccatttcacggggcttctgttcagagcaaccttttctcttgcaacaacaaaacagctcccatttatcaatcactgactaagtgccagacactctgctaagcactttacacacattatcttgtttaatcttcacagctgtgcagaaaaaaacgagtgttaatgctgcatcacaggcaaggaaactgaggctcagagaggataaggaagttgctcgagggtgcacagctagctggtaagctcaaagctggtgtctgaacaggcctgtgttcctaaccagagtcctatgctgcccttggaaggagattcttgcttgagattatggataatttgttttaatattttttcaaaatgctctgcaacattccgaaagggaaagaaaaaagttataacttgttgggggaaaaaaaaaggagaagaaggaggcagaggagacagtaagaggaaggttgggtaatctgcgaagttaccgtgatatgtggagggaaaatacacacacacacatacacacttgcacatgtacacacaccaacaggcttcatctgtcatgtatctgggattttgtgttaaaggggccgggcacagtgactgacacctgtaatcccatgggaagacagaggtaggaggatcacttgagctcaggagtccgagaccagcctgggcaatatagtgagacctctctacaaaaaaaaataaaaatttggtacacacctgtagtcccaagctgctcaggaggctgtgggaagatcgcttgagcccagaaagtggagattacagtgagccatataatgccacggcactccagcctcgatgacagagtgataacatctcaaaaaaaatttttttttaatccaaaagggtagtttttctcatctagggtttagattattagtgtcaaaactgggggggaatgtcccaaaataaattattccctatcatgcttctaagctacccaagagacttctaagcccacagccaggcattgcgtctccagccagacactgcacacgcttcctcagagtcctcccagcagtcccaaaggtagagattagagcccccctgtcacaggtagggaccctgagcctcacagagagtaaggtacaggcccatggttcctcaggtgacaagagacagagccaggttttgaacccaggtcagcctgcttccaaagcacttccaccctgcttgcaacttccaatcatgccaataccaagttgggggtgggggaggtgtgctgttgctaagtggtctcaggccaggagagagagctacagagatgctacacagagcctgagtggcaggagagtggcactcaaatcctcagctctggccagatttcaggaaggcaggagcactgggtggggagccaggagacctgggcaccaccagagctccaagataaacttgggcgagtcacttcccatctccaagcctttctaagcctcaaatgccattttcctgcagaacaggagcttttctgggtctcactccagaaggaaacctgaccccttgctttcccttcctggaccccgcctctccaccaaatgccacgctgcccagaaaaggacgagattccagggtgccccgtaagcagaggccctgagaatccaatgggcgggcacctccacccaccagcagctgccctcctctctgatgcaaaagaaactcgtgggctggtttttaagactcgaaataaagtttaaatattacgtggaaattactaaacaaatcaaatcactgttaagtagatgtcacaggcttcctctagacaatacatttaatgaagattattgtcctcctggttatagttttagatttgcattttattatcagagaaccacttatgcattactccaggattttcattaggtaaataaatttttatgtggatttcattatattcccttggctgaaatcctgatcacttaacagcaagaatgctgctccgacatcctgtgtgtcaatcaggatgtaactgtttcctttggttgttgaaaattactttttaaaaaatctggtgttgatggcaaaaggaagagagatagggtcagaactctgggtaggttttgtgtccagttctttcactgaaacatacacacaccctaaaaagaaattttctatttaaaaataacacatgtaattttacatacatgggatatataagctcccattctctctttctctccatacatatatataatatatacttttttttttcctggtgtcactttggcctctcagatgtaaactgacacaatggcaccgggtctaacaggactgaggtgcaggtcagtaccagagaaataaagttgaaagaaacaagcttggaagaagcaggaaggaaggcagtgggggagacattcctggaaaggcagccatcagcaagaaaaaaaaaatcttttctaagaagtctaatatgaagcaattaagctaattggaatctagattgtagtgggtgcctccggaaacttgagaccaggggactctcttgctggaaaaatcacacctcaatatcaatgagcgagggcgtgaatgaacgaagtggtcagaaacagaccataacatccagacctaatccatccagccccctaagacacaggcggttccaggccctttccgagggaccaacaaggtttcagaagaatgtactaataataaaatctcttgcttattgaaaagggctggccaggtgtggtggctcacgcctataatcccattactttcggaggccaagacaggtggatctcttgaccccaggagttcgagaccagcctaggcaacatagtgaaacctccatctgtacaaaaaatacaaaaattagccaggtgtggtggcatgcacctgtagtcccagctcctcaagaggctgaggccagaggactgcttgagcccgggaggtcgaggcttcagtgagcggagattgtaccactgcactccagcctgagtgaaagagcaagaccctgtctcaaaaaataaaaaagaaagggctgtcacatgccagggatgggctttgatgtgcattattacatctgtctctggtcaatccagcccagaggactcaaagagaaccttccaagatgcctttcttaagagcaaatgagagaggcaaagctctcaacatggccagggcacgcagcagcaggggctacccaaaatgcagttaaggggaaggggaacaagtcaggctggattgattcatggcatcttcaaccttaactcctgcccagagccaggactctgatgttgaggtcccagtccctaaccacctgtgtgattggggaaggtcattaccctccctaaccctgttccttgcctgtgataataagaataacagcaccaacctcatagagttgctgtgagaatcgaaagaactgaatagggactgcttatgtctagtgcctgggacgcaggaaggaatcaatacatgttcaccattacagggaatgttttctacacagaactatcagcctgaaagtgagtcactttccgacagttctttccagctgttgatgacttaccaaaactacctggactccaattccaagttctttaaggacgcaacaaaacctccttaatcttcgatcccaaaattagtcacctgtgatactcaagtaggggtttgactaagcatttctctctgacctttgaaaaggccactggggaagaaagcaaagggacatgataaaatgaggatgcctgaaaggagggtccccgctgcaacagtggtcctcttcagggggacattccggagggtttgattttcttctctatagttttgtgtagtattcttatctgctgcaattgagcaagtattgcaacattttaaggactttaccattctgtgaaggaaaagatattaaaaaatataattgccaagcagctcagaaacatcttccgcataaaataaaagagatacatctcccggcccaggtcagccatctgacctcatcacccacttctcccgatcacctgctcgctccagcctccagccacagagcaggcccccgcctcatccctcctcaaacacaccagacagtcttcaccagttcccccacccctcatccttccttgtcttcctgagccctcgtctctgacaaactgtatacatttcacttccttgtctggttaccaacaacaacaagcagaacatcagctccaggagggcaggggtttggatgtttctcactgcagcagcaagaaccctacctagtctgggacacgacagacgctcagtaatacttgattggatggaagaatgaatgaatgaacagctaactttttttttttttgagttggggtctcattctatctcccaggctggagtgtagcggctcaatcatagtttactgaagccttgagctcctgggctccggcaattctctcacctcagcctctcgagtagctgggactacaggcatgtgccaccacgccaggctaatttttgcatttttatgttttgtagcaatagggtctatgttgcctgggctggtctcacacttcaggcttcaaacaatcctactgcctcggcctccggaaaaattgttatgttgcctttttttttcagtgggggtagagaaagagctattccattctttttctgggggtagaatatcccctaaccctgggattataggcgtgagccaccatgcccagtctgaatgattaacttgaaatcactcttacacatttattaaagcagccccaagaatctctttttacacactttcttagtgaccctagtatgaactgctaaaagaacttcctggaagtacaagtgcaagccatttcgttgactcttctccgattcagacttttcacgaaattcacagtggcctcctgcccaaagagcaccaccagatggcccatctccagggtcctgaccccacattccaaattcaggcatttttcttgaagagcatttatcactcaatcaagccacccaccctgccaaccctgaataacaccacttacgggaggctcagccatcgctgcttagaatctcacttgtcctcaaatatctcctgtttatcttggtaacagtctacatgaatagtccgtttgttggaagaacataatattttccttggcttttaggcaacagtctggcaaatgagcatttccccatgtaacttgtgatggctttatgcgagcagttaattagaattacacagacatgtttatagaagtttaaatgaagcatagttcgagtttgtgaaaatatatataattactcacaccgacacttcccactgaaaaagaaaaggcaacataacataagcaagttccctaaaagcaacagcaggggcctagaaaagactccgccagcttaaacagctccactttgagggacttggggagaccaaaccctgttggggaacccacagacccaccaccaaatgctttgctcattagactcacactgcagccaacaaattccccaaagagcccctgggcgggcgccatgctccaggcgagtcctgtgtggatccttgtacatacactacagtcccgcccacgcacacgcagaaaggccatcatctgtcccacaaccggctatggaggagaggtctggagacccagggaggctctttctctacccccagggagaatgaaccgtatttttggcaggctgaggactcaaattagggaggcttcatggcaggctggcctgtggccttcaagaccctttctagcctggttccactcgcctcctggtctgatccctgctcccgctgggccctcattcaccctccaatgttgccaacccagccagagcaagccgttttctcctctatccccagtcccacaccaacaatgcagcagcacccatatcatgtggctgtccccagacccacgtcatctgagccctggggatggtcaagccggctattccaggcagttactcagattgcttgttaaacttgaaggaatcacagccaactctttccacctctgtgttgtgtagaatgaccaactggctcccagatcagccttacaatctggcattggcaatcctcacaacggaactgctttcccaggagtgggctgggctagatacccctgaaatggaaggatcccactatctcatggacagagggagtccccagcagtgtaaacgagccctccttctttgagcccgagagttggaggtggcagtgagctatgatcacaccactgcattccagcatgagtgacaaagtgacaccctgtctctaaataaaaatgcaaaaataaaaactgtcctggagcaaagtgaccaaacctgtgcagaaagggtcagatccagatgtccagaccagcatccatgttgccccctggcttcagcgggcacctaccagccaggaaggcggctgaactgtgtccagactcccttcctcagcccactccgctgcacaggttcaccactgcatgccctacctccagattggattttttcacagaagtggcccttggagaagccctgccagcaatcccaacactgtcaagagaagtcagctccatgggctcatggagaagttcttgttcttcctcaaagaacaagaagaaatgtgggggctccagtggagaggaggacagaaacaggaaaaaagagacaggaattcaggtaagatgggggacaagcggctccttcattcagtcaatatctcctaaatgccaactacatgccaggcactgtgaatcccttctccatcccactaaccctttctcctgaagcctagggacacaagagtgggcaagtcaaacctggcccctgtccggggacagtcgagcggccactgaggaaggaactgtaaacaagtgaatacatcaataaattcctactgagaacaactcacatgacattaaaaagagcaagagagagacagtaacagcagtgggcccactttgggagaagggtcagggaaggccgcgcagaagaggtgacattgaacctgagtccagaagaaggagaaggagccaggcaggctagtacagaggaagagtctcagtcacggggaaagccatgcagaggaaagaacggcacagtcctaggacatgagttgaggccgggggactgatgagatgtgagggagagctcccatgacatgagggagatgctccggaaccttgcatgggaagagacagccgctcacacaagctcccccagacagtgctgggtgctccccagcagcctttccccctccttctttcttgctggcctaattcaaattttgcttgaacatccccagattcactaactccaaagggagctccgtatgttggcctgagattggtgcaggatgttcaagggatgccgttgtcaacacagtgagatacaagggagggaacatggggacatttaggagaggtatctttcccctaaagacaggcctgtgtcagggagcttctctctcctggtctttggacactgatgtgtcggggggtgatgtctggcaccacagcagccatttcttcatcatgaggagacaaatccgagggcaccagccaatgagttgagcaggacagagcataaagacagaaggcagctcgatctctgctgacagtactgagctgctcagctaagttctctgcagccacactcctccacacttctcatcctaggagatctcacagcccctcatgcttgagcttttccgaacttggattgcacatcttgcagctcgaagcatcccaggtgatacaatcctgtgtcagccagccagttccaccaaaattgaatttctgacctgactgcttgctcttcctctttccagaagaccctgcaggtttctctgcaccgctccctgccaagaggagctccaactatcagagatgcaaccctctccccaggggaatttcacaacctcagggtgtgagggggaacacctggccagagccagagcagtgacatggtcaaagtacagctcatgaagactgaggcagggggagaagagaacaaagcgttatgcttaatgacaccacccagaaataaagagttaaagaaacctcaaagcgcctgagtccatgttctacagtgaaatctttctttattcattttatctttgtaaatctctctttacttattttatctttgtcttcaagaaccctaggaaatgggttcattttccctattttataattggagaaacaaatcatatagggtcagggttaagagggcagatcaaatcccagtatctccaattatttaccaggtttgtgacctcgggcagctgtatgaccttgggccgcagagcctcagtttcctcacctataaagcggaactaatataactattagctggagctgctgtgagaacagcatgagaccaccatacagggcatgaaactcccagtgacttcccaaggcagtccatgatgaaggcctggaagcacaaagggatcaacaggagctgttctcccaggggacacttgggacacccagactacagggaagagcgctgcacagtgaagaaattattgataaagtctgagcacggtggctcacgcctgtaatcccagcactttggtaggccagggtgggcagatcatctgaagtcaggagttccagaccagcctggccaacatggcgaaaccccatctctactaaaaaaaaaaagtacaaaaaaaattagccaggcatggtggggcgtgcctctagtcccagctactggggaggcggaggcaggagaatcacttgaaccaaggaggcagaggttgcagtaagcactccagcctgggtgacagaacaagactatctcaaaaaaaaaaaaaaaaggaagatgccagtattcatcagtttcacctgctttctttgttgcttctgacttttcctcctctaaagtggaggctccataaaggcaccaaatatccgagggccctggccaccaaggctgggtcatctggggtgtggggcaggcatcattccttagctagaaatccaactccagccctgaagctttgtcaaaccattcccttaatggacaggtattattctgggcccacttaactccagtagattccaaaatcgggccaagccagctgaccgagctgggcggcgatgctgcctgagtctgaaaaacagattctgagctcatgaaatgcctgtcttctggggtagcaggccccagagagatctgctgaggaaaaggccaggaatgttctgagcaaagacaagctcctgggaatgagggtgtgacctcgcaaagcgactccctgtccatatctccacccccagccaatatggacatcaggagagcttgaactcacagccactggggcaaagccagaaggcccaggaagagctcctcaaataggcgctcctcaaataggcaggtcctgagtggggcaagagggggaagggtacagccaaaagatgcaggagcagttatgacaggtcagaacagagcacccgaggggccaggtgaatcgctgacttcaagcctacagggcacatggtgaactgagaggacccactgcaagcaggaccctaaattccccaggggccaggcagggacatcaatgagtgacttcagccaaggtctggactgtgatggacagaagagacatgcccacctacagaagcagtcaccacccccagccccaggatggtagccaagcctgaaacggggaccttgaagtcccagatctacccattgcttaggagacagaagcaagaactccgatttttttctgtgacatctccaatctctcaatgttgatttctttctttcaaacacagcgcaagccaatcaaaacacatctgtgagcaacactcagcctccagcctccagttcgcagccttcatctaaaaggttggaagggcaacataaaggagtgggcgctcaggtgagcaaccctcctcctcgcccagccttaccaggcctggcccctcatgggaccctgattggaactggggtccacgcacaagcttggggaggtttatccgctttcacaagctccgcccagcaggcaacacccagagcccaggactccagccaggggaacaccactccgcagagaaaaccctcagcacttggctcttcctggagcctgaatttcctccccaaacaggatggatttacgtgcgagagcaaaggcctacgcatgcgcccagctccagaccccggtatttatacagtttcataaactgcaagcgattattttgtttcctaagaacaatcactatgcaaatgaaacctccagctaatacaaacagggctgttaaattcacttgccaatgtttatgaaaagaaactcagcctggccctaaccaagctcgctaagaaaatgtttaatcacaagacacattcgagtgaggaaattaggcaaataagaaaagatgtcctgacttcgctcccagagccccctcccacctcccaccccctcctttattcggcaagacaatgatggtgaaatgaaaaggttcccagaagacggacagatgtcaaggcttaagaaggaaaagacagaaaatgcagagattagggaagcactggttcccaaatttcaacagccccctcaggaccttcccactgtatatgttatacttgtttttcagggatttcgtgggaagggaggaggggagcatgtgcaggggggcagcagggctgggtgggcagggagggcagggagggcaggtggaaactccaggccgctcctggatcctggctcttgcacttggctcctgtactcggtcaggccactggaccacagaactggaactcaggatggagcgagttcccagctggggcgggcagtggccttggcttcgcacagcctgtcacagggcaggcggcaggcttggggacccagccaacacccgagcaggacagagtgaagatcccaagtcctcagtgggctgggcggttgtccctgaagagttaacagccccagggtcaggatcaattggaggatgttagggcgaagaaaaatcatctcatcaggcttgcctgggcttaaggccctgcagttccactacatacagcctatataacctcaaacaagtgacttcctctctcggtgcctcagttgcctcatcatgaaaatacagattgagacagcatgaacacagtgctgtgacaatacaaagagaccctaaacgtagtcagcagtcctgggaacacaggcgtgtttgatggaggttagctatctgctccaagtccctcaatgcacagatgaggcccagagagggttggtggagttccccaagtcacacagataaacagcagacaaaggatttgaccccggctccagcctctccagcagagatttaggggaagaatgggtggaggccagggctgggccctgccctgcgtcccctctgggaagcacgctcgccaaggaggcggtggtaggagggacctctggagccactgctccctggggttgggggaaaccggagcctggtcctggcagggcttcccaggggcccgggcaggggcagctgtccagaactgtctgtccacggagggggcagggtggctgccactcggagcacgctgtgtgccagtccctggggccgggccggctcagcctgcaggctccatccagagcccgccccaggggatgctgggggagagcgccaggatcagagccgccggctgtgcgctcccctcccccagcaacaggggactaaagtgggtcaaggaggaaggagggggcccaggagggctgggggaggggccaaggagcttgagaaggcacccagggggaggggaccaggggaagatgcctggaaaagcaaaaccatgtgtgcagtgcgccttggggggccagggctgagcggcagaggggctgctgaggccttggggggagtctcagaatcacctccggattaacaccagggtggctgagccttggctcttgccccagaaagtcagtccttcactttctcccaccccctggccttggggggctccctcttctctgaggccctcagcctcttccagagcccccacaccccatgggcccccagccaaggggtctgtgaggagcactttcaatcagtgctggccccctggctcagccctggccttgagcccagctgtccagccgggaggtggggtctgaggagggtggagagaagaatacagacaaccccatcctgggcccagactcagcaggactgtggcggtgccaggccaagtcaggcctcatcaccgggaagaagggtgagcatgggccccacatccccgcagaggcgttcctgggggacctggtgcaaaataaaagggaggaaggcaggaaatggcaaacagcgacgccccctagccaggaagggaagccaggccacagacccctcagagacagggctgggggcccacagtctgctccggggagatgcgggccagtgggcagcctccacccctggctgggcctgacccaatcatcagcttctctcccagctcccccacccggcatggcccaaaaaaaagggacgcaaccacccaagcaactcgatatggtccagaaacctccagggtccccaggttccaggaagcctgcataggaggtggtgggggggcagaggatgcagagggtccggtgcctgggagtaaggtttcagcagggaggggaagaggagctgctgctcccgggtgttggtgccagttgacaggcagccgggaaaacggggcccaggaggggcacacacccacaggttccaacttaagccccggggaaaatgctgatgggaagaagaggcaggcttccaggccaggtcctgggcccaaggagcagtttgggtggagacagagagaggcccagaggacagggccctgttttgaatccctcagcaaggccacctaccccgacaaccacagctaagattcctagctgagccaactggactcctggggccttgtggggaaaacacagtagaaaggaggacccccccagcctaaataccttaaatgcagcaaacacctccaacttcgcacctagcagaacagaggtgctggcctagttgtgccaggccttgaaccttgctgggtgtgcagttcccaaaaaatcaggaagcaagtacagccctgcccaccacctgtctcaaatgtcccaggacttggcctgggacatcctccacctccaacctgtccaagctgcttctctcccaagtgagcctcaggagcaggcccagtgggggagggggttggcatggagggaagggggacttagtcaccagctgggtctcgggggatcaaggtgttgtcagcctcagagtttacagtctgcctccaggagctctgggagaagattccggcatggtgctggctcaccaggtgtgtagacagtgaccctggcagttactcaggcaggcaccaggcatggggcagcctcactgtgacatgtgaccttggacctcaggctgaccttcaaagctgcctcacccacaggatggcgaacataatggtaccaacctcacagggctgcagaggggattcatgagaacacgtgcaggaagccctcagagagccctggacgcacaataacctcagtaaatactccccatgaatgcccttatcccctcctgatgctccttctcccccactgaacctctctccacaagagcaggcttggaactctcctactagtaagaaggcaggacaggatacaaagagaggtctgggaccaggcccaaccttgtccaacacgtcccagtaggaaaatgagctcagaccctgggaacccaggacaggcctctacattcccctgggagagcctgagcaataggtattttgagccaacagatacaggaaattcagaataaagcccactcagattcccaattcaaagtggactgtggacgccgggacacattggagcaactgtttcctcactggcctggtttgatgtctgggggatgggggcagctcagtgtgcaaagccaggctgagggacgtgggtgacagtgatggagcatctccctccacctcccaccccagtaatgtacagagggggccctggcgagctgaggcctgggggtcagggtccctgtccatgggatatggagaccttggaaaggagcagcctgcctgccagctggacacaggccctgctacacgtggctgtgtgagccagggcaaggctgtgtgcgtctctgaaactcctttcctcaactggcaaatgaagagggacaacccctccccagacccccacaacctactccctggaaacttggaggtgcctgtgagagcctctggaaccacacagtgcacagaggttgtgcaaaccttaggggtcatttaagcacaaggccccggtggctttccctggggactccccagaaagaaccatgcaccatgctgtgtgcacgcatcaacaggccacctgcaatgccaccccaacccagccatctctcccagtacccgaccctgcctcttccttcatccctgctccagcccttccaggagagcctgccagcacttgcccctgcccctccagacagtcacactcaaaactcccccagattttgtcccatcatgtcctcgtggacagagactatggcctcttcttctccctccttccccacatggggcgggcccaaggcaggcagaggcagccctagtgaatgagttcagagccagaggagactagccactgtcctctgcagttccctctcatcttcctacaccagcggtcacgtcacttcctctgcagtgccctcccgggaggaccttgtcgaagtcagataagccagagcggtctctcaatgaacaattacaatccggggagctgctcactctttattgtctgtcttgctactaagccgtaagctccctgaaggcaaggacccagcactagcatttggcccatcacaaactcagaactatccatccagtgaatgaatgaagtcaagaaggatccatccagagaaggaattttaagcggcaaacccagaatcatgactcaaatctgtgtgccaatcttcatctgtaatttactggatacgtgctgatgcactggaagctgcacccccggggccaggcctccagcccaccacgcaggcctgggcaccttgcaggggctgagcacagttctggggctggagtgcctccgttcaaatcttgccctagctgtggggcactgggccatttattttacttccccgtgcctcggtttcctcctctgtaaaatggggatacacatcacgtacctatttcacaggggtgctgtgaaccttgaatgaatcaacgagtgttaagtgctcagaacagtcctcagtacctgggaagtgcgctcagcggcattacgtgtatgaggatgtaccagggaatggccctgcggctgtcactcgccttcccccagccccaccccaaagcggaggcccgatcggggttccggtgccccagggctcccgaggcgcacatctggctggcgggcccgcagcccacccaagggcggcaccagctgtgggctcgacgccgccgtccccagcgctgggcctgggaccaggagtcctgagggcgccagactccgaggggcgggcggccggggggcggcccgcggcgcagaacaagccaggccccacccgggccgcgtgagcgagctgcgcagcctgcgccttcccagccggccccccgccgcggccgctttgtgcccgaacctggccctgagtgactgcgccgcagccatggagccctcccgcgcggggggcggcccagcgcgttcccaatgccgccgcctcaaaggggtcccggggccgcccccgcgggccgggcagacaagggcccgggaggggctgcgttcccaagcgtcggccgggctcccctcgggtagctgggcgggaagagccccgaggccccctcccctgattttccccgcctcttcccagccatcccccctcttccccgcctcctccccaactgccaccccaccctggatttcttcctcctctccgacccttgaccccttcccctcccccgcggtttctccgtcccctcccctcatcccaggacccagatcctacaaggcaactgcgcaatcggactccagggggaccgtggagggttcagatcccacctcccgtcctggaaatctcggcccccacacccagacacttcctcccaccccacaagcctcaggccacagccctggcttggagaagggctagatgccttggagaggggccggcctctgaggtaacgggctgtgggagcctcctggccccatgtgcccatctgtcagatgggggtgggaacgtggtccagtgccaggcacagggagcagtgcagtggcccgcacaggcaggagttctgccgggtggcgctcacagcaggcaggcccagggaggcccatcctctgagccctcccagttacctgtgcattgagaggcctgcatgtctgcagcggaggagcgggacatgacactgaggtccccagggcaagactgggaccctgaagcggcttctgcccagaaacagccccaaggaactgactcgcggccccaggaaagcctccagagagaacagagccgggccccacccagcctgctggctgaagctgcagcctgcaccttcccagccggctcgccgccctcccagggtgaagagacagaggctcagagaaggacccccacctgccacaacctcccagcctcccaaagcatcaaccacaaagacctccaggcccccagctcccctcatgaagcagcccccttcaccatctgggatccagcatcacctccaggatggccttctctgcacagcctccctgcctgccccagaacctaatttgcttaacagaaatatgcttgcagatggctcctcactcaactagaataaacctgtccacgtggtggccacagcaccttgaatactgcctggtacatagtaggttctcagtaaacatgtgcgaggaatgaatgaacaaatgagcagcagctaatgatagcagctcctaaaagccttgaaacctaaaccgtgccccagataagaggattccatgacaagtgatcaaataagtttggaaatcacaaattattaacatctctcagagtcccacgctggcattttaagggctccgagaagccgtgaagtttttttaaaaaaaattttaactctgtttaatccagtgtttgccaaatgcatttggcgacagaaaacttttctctttttgggggggtggaacatcaacaaaatcctggaatacattttgggaaatgccaatataaatttatttcccatcctcacaaccacaactttacacatggccagctgaatcttagaaaggaagaacttgcttctttctcgttacagggtcaggttaaacacaatgctccgaaaatatctcaatgaatggatataaagtaaattcataagcaaagtctaccacccactagtatgttctctgtccctgtactgagagtctgaatcacgcaagcaatttgaagagtctctttgccctggaagctggcacatatgaccactcacacaggcacacacatgcacacacacatatgcattcatgcacacgtgtacacactctcgcatgcatccacatgcacacactagtacacacagactcacacacatgcacacacatacccaacaggtacccacacagactcagacacacgcacagtcatgcatgcacacttatgtgcacatacaggcacacagactcacacacatgcacaactattatagggcatatgccctcccacacagccgcttccctgagcctggccaggaagccccttgagaagggcaactgttttctggtggggtggggaggacggattcgaggagagatccaaaagcccccttcaaacctggtgtctctaaaaagggcagggttgccccagcaaatgacaggctaaagcctgaacaacaagctcttccttacctgagatttcctcctcacctctctcctgggagtagagcccatttcaaaggaaaagaaactgaggcttaccaataacatggcaaggacgtggggaaagaggggtaggagcccaaatctgtctgctcagaatcctccccccactccagaagcttggggatcctaggttgttccgaaggcaggacagtggcagcagcaagatcctccagctcccccttctcctatccccaggcacaattctgccacaaggtcactgtatgaccttggacacctagcttgccctctctgggcaagtttaatcatctttatgaaaaggaacctcagctgagggttctccaagctccaggactgctggtaaaaaagaaagcctaaggtccccacctcagcagtcaaaagcaagtgtcaggattccatgaggtactgcccgtaacgtgcatagcccagtgcctgtatacaaggggtgcccattagaggctagctactcttggtgttgtgattccatccctcagggaccaaataaaaaatgctacccgctcttccaggctttacctgattcccctaccaaagggaatcccccgaaactctctcacccctcccacagccctcagcccacacttctgtcctaggctgccttgtctggtccagtggttagggtctactcccctctctggcctccaggcttcctgaggacgtggcctcctctgcgttctctctgcatcttccttggagcctaggctaagcctcacctgagtcagatgctcaggatttacatggaaggatggatgtgaaagggaaagaaggagggcagacaaccaaaggactcaccaagggaaagaaatgcccatatctccaagctctatagtgcagtgacccttcagaagaagaaagaaaaatggccaggtgctgtggctcacgcctgcaatcccagcactttgggaggcccatgcgggcggatcacctgaggtcagtagctcgagaccagcctggccaacatagcgaaaccctgtctctactaaaaatacataaattagccaggcatggggggcaggcgcctgtaatcccagctactcgggaggctgaggcaggagaatcacttgaacctgggaggcagaggtcacagtgaaccgagatcgtggcactgcactccagcctgtgcgacagaggaagagaagggaagggaagggaggggaaaggaggggaggggaagggaggggaggggaggggaggggaggggaggggaggggaggcgagggaagggaagggaagggaagggaagggaagggaagggaagggaagggagagagacaggaaggaaggaaggaaggaaggaaggaaggaaggaaggaaggaaggcaggcaggcaggcaggcaggcaggcaggcaggcaggcccataaacataaaaggccaggtgtggtggctcgtacctataatcccaacattttaggaggccaaggtggaaggatcacttgagcccaagagtttgagaccagcctaggcaacatagcaaggcctcatatcttgggggggaaaaaataaaaggcaacatcactaataattagggaagtgcaaatttaaacaatgtgccattttttgcctgccagattgccaaaaagaaaacggaaagagaaaaaggctgggcgccgtagctcacgcctgtaattccagcactttgggagcccaaggcaggtggatcacaaggtcaagagattgagaccatcctggccaacatggtgaaaccctatctccactaaaaataaaaataaaaaattagccgggcgtactggcatgtgcctctagtcccagctactcgggaggctgaggcaggagaatcacttgaacccgggaggcggaggttgcagtgaggcaagatcacgccattgcactccagcctggcaacagagcaagactccgtctcaaaaaaaaaaaaaaaaggaaaaagaaaaaacaaaacatcatcacatacgggcaaggattaggagaaatgtgcattcatgccctattattgaagggtaaattggtacagactttgtggaaggcaatttggaaatatttatcagatttttcgagtgaataccctttgacccaacaatttcacttctaggaatccagccaaagaaacactcaaacaagaacacaaaggttataaatgaggatactccctgcatcatcatttaaaacagcaaaaaactggaagcaactaaatgttcaccaatggaagactgtaaataaagtctggtgcaacgattctgtagacctccttatggctattaacatggaacagatttatatactctaggtgctatctcctagactaatggttcctaaccctggctgcacattccaattacccccatcctcagagattctggattatttcatctatggtggagcccaggtaatgttattttttaagtgcctaggatgatactgatgtgcaactaaccaagattggaaacttaactcatgtagctaaccctactagttctatcctatttcatagaaaactgagaaactaggaaaacatagaaaactaggaaactgaggcccatagaaggaactgtcttgcccaaagtcagagtatgtttcctccaaccccctcccctccccaaggagagaaatgaaggaatcttgactcagaccttcagggagaatggggtctttcttttctattctgagtgattggcaggttccctaccaacacatcccatttccccctcccgcccacttagctggccccacccctcactcctagtgctgttcctagggcagaccaccccccctccaaagatgaagagggtcccaaggccacttaatggtggctgatccctggccaggatcgagctggtcaaatgtgtttattctgagccatggcaatgatgtagcaggatgagcgtcacaggcaggatggcaaggttattgagttgaacattctgttttatttaaaattaagtccaggcacagaggcgtatgcctgtaatctcaacattctgaaagcccgaggtgggagaatcgtttgagaccaggctaaacaacacatgaagaactccatctgttaaaaaaaaaaaaaaaaagaggcggacatggtgactcgcacctatagtcccagcaactcaggaggctaaggaaggaggatagcttgagcccaggagtttgaggtggcagtgagctatgataacatcaatgtactccagcctgggtagcagagcaagatccaaactttaagaaaataaataattaaaattaaattagtacaaaaatctcacattgcttttatcattttaaaagcaatgttttacaagcctaacacaatccatgacacaaagccctcgataaacagcagctgcaatctcacagcacaatgtaccctgagtatgaaggagaaccggcatcagcctctcccagccgggtgtcctgcagctcccacctcctcatcaggaacagaggctggggcagcgggaggggcccacaaagactgactctcacggtgaacccaagtcctgcaaaggcctgtgctccctctcagttcacccactcacttatccactcatcacttatgaatccatttactcatcgagtcatttactcactagtcactcattcattcattcacttgttcacccattcatatttattccccattcatatttattccttcaacaattcacacattcactcattcatttaataaatattggcgaggccctgtggctcacgcctgtaatcccagcactctgggaggctgagaagggtgtacacctgaggtcgggagatcaagtccagcctggccaaatggagaaactctgtctctactaaaaatacaaaattagccacgtgtggtggcacatgcctgtaatcccagctactcatgaggctgaggcaggagaatcatttgaacccaggaggcagaggttgcagtgagcagagttcgcgccattgcactcaagcctgggcatcaagagcgaaactccatctcaaaaaaaaaaaaaaaaaaaaaaaaaaaacaaatcttttagacataatgacccagaagattgaggccagatttttttgtttgtttgtgttttttggggttttttgtttgtttgtttttgttttaagatggagtcttgctctgtcacccaggctggagtgcagtgggttccagcgattctcctgcctcagcctcctgggtagctgagattacaggcgcatgccaccacgcctggctattttttttatttttagtggagacagggtttcaccatgttggccaggctggtctcaaactcctgatctcaggtgatctgcccccctcagcctcccaaaatgctggaattacaggtgtgagccactgcgcccagcaattttttttttttaatggatgagaggttttttgttttaatgttgcccaggttgaactcgaacacgtagcctcgccttcttatgcaccgggacaacagttctgagccaccacggctcccatttttgttttgttttgttttggtttgttttgttttgagaaagggtctcactctgtcacccaggctggaacacagtggcatgatcatggctcaccacagcctcaaccttccgggctcaggtgattctcccaccttagcctcctaagtagctgggactacaggctcctgccaccacaccctcctaattttttttttattttttgtagagaggtggtttcgccatgttgcccaggctggtctcgaactcctgagctcaagcaattcacctgcctcggtttctcaaagtgttgggattacaggcataagccaccactgcacccagccaaggccatttctgaatgagcatggagccctggaagcccagcaggctgctggcatcccatacatgagacccttcccctgagaaaggcaggacatggggctgctggagggactggggatttgagctattcactgtggccccaggaggtggaaccaggaccaacacagagaggagactgcagcttcatgtgtgaaattcaagctaaaaagccacggatgaggccgaggcaggcggattacctgaggttaggagttcgagaccagcctggccaacatggtgaaactccatctctaataaaaacacaaaaattagccaggcctggtggcacatgcctgtaatcccagctactcgggaggctgaggcaggaattgcttgagcctgggaggtgggggctgcaatgagccaagatcgtgccactgcactccagcctggctgacagagcaagactctgtctcaaaaaaaaaaaaaaaaaaaaaaggcatagatatgccacagaggtagtgagcgccctgcgagtgaaagtgtgtacgtccaggctggatgaaaccaaggttgccagaaacacacccaaagaagtgtaaatgaagtgagctccaaggttccttttcaacctgtgtttttcaggattaggagaggctcaaaggcaaaaacagtgaatcttcccaaaatgtgtgtctggcccctggctggccagcgtctccctaaggggcacaaggcatctgcaggggctgtcctgggcactgagaacccgtgcactgcttgctgctccccagagaccccagcactctctgtggcctccaccccagagacagaagcctgcctcctctttccatctccccacttcagggcacctgcttctcctccctctccctctccctggggaccctcaggagctgatgattgtctctcctctctccaagttcaaaactgcagccacagggggtgagggacaaagccatatctcttgttcaggaaccaaaaatatactctatgttgctggtggctccaaggttctgcagcctccaggccaaggaggtccccctgcccagtcttccagcctgaatgtgtagtcataccaacccagctgccctctccagccatgcccacctccctaactaagcccagatggtcatcactctgccttcaggcaggtaaaattcagtgcaacaggagttaggtgaacagtatgttttatttaattaggatcaacagaagagataaacctcacagcaggatagggaatgacaacactgcaaaaaataattcatgcccaggtaacgaaagggcaaatttcaattacagagaaaacagggggagaaaaagtttccaagcacctccaaggagcgaggcagtgaagagtttgcaaagcctagacctttgggcccaagatggtctagaaagcaaggcaatcaagtggacaaaacagccattcttctctctccttgtcatagacaaactggcctaagtgtgcaggactgggtaggccgagggagctgagtcctggcaggcaggcataggggccacaagggatctgccagggccactgggcaagctcgcaacccaccaggcacagtctcaaaagaatgctgtccccacaaggagacaaaacaaatattctaatcctaataatggtcatcagatcactcagcaagtccttattagcaccccacctgccctttcccccagccctgatggaaccctagtcttatgccctgccctagccttggacaatccaatctcacctcttacactagaacaaggcaaagaacatacccccccgccccccgccgagagaatggcctcatcttctaagcctctgtttctcattcttaccctggaaatgggaggctggcctggatgacctcctctggggtagtgggctgcagatccctaatccaccatcatttgggtgccaactataaatgaaaaattcatggtggtgacagcccgacaacaatgtgtatgtacttaatgcctctgaaaaatggttaagatgggccatgcaaggtgcctcatgcctgtaatcccagcattttgggaggtcgaggcaggaggattccctgaagcctggcattcaagaccagcctgggcagcatagacccatctctacaaataataaaattaagaaattagcctgtagttctagctactcgggagactgaggtgagaggactgcttgagcccaggagttcaaggctgcagtgaactacgatcacgtcactgcactccagcctgggggacagagcaagatcctgtctgtaaaaaaaggaaaaaaaaatggttaagatggtaaattttaagttacgtatattttatcaaaattgcttaaaagcaggagttgggggatgaagagatctaagcccctcctcagaccagccaggtgagcatctgcaggacctgggcccaggaatatgcaatttaaccagctttattgtaggtgacggtgataggcatgacagctggggatccactcatctgtatgaagccaccctttccccaaacaaaggctccccagcataatgcttgaattacctcaaaaaatacttcttctgcaaatgaatattcaaaacagtgagttctccaactttcatagcacaagcaaatctttttctgtatgggttctccctccaaaacaaaccctcgagaagcacaagcataacccaggcctctgtctctctcccggcccctggtccctgctccaaaggtgacatcagccccagcacccccattatctgggagagggaaattgctgttaaattagcacatccacagagccccattttatatcccaattcagaagatgacatgaacatctgctttcacttcaagacattaattttcaattattggagaaaaacaaaattagtcctgacaaattgctggcgaatacaggctcttgtctggtggttcataataataacttcgggggcccacaattagtgtctcggacggagtttcctgatggatccctgtcatctggaggcagttggcagcagggcagcacctcgcaccgcagtgtatcaggcaggaggatgctccaacaacccgcagctcgaaggtcactgcttcttggatgaccaggtttagagaactaaggaattagggtttcctctttctggggaaggcagggagggacagaagatagggggcaggcatctaaaaaatatccacctgaaccatattcagctttgaatatttttcaaggttttctcctcctgttcagtagcaagattttgcacacttagacgggaatgcaaatcactcctgagtccttagtgggcacactgggatcacctgataggatcgccttatgattggagtttgccatctgcaaagggagaaggacagatgacatgattttcttatgagaccccttctacccttctacatgacgtcattcaggatcccaaatccagaactcaatggctccagcctctgagatacaaatgcctataaatcttctgtaagaaaaaactgtttgccagggtcccatcgacccagaacctggttcagcccaggttgtagtctccacaaaaaaaagaaagaaagaaaactctgaatttgccaacctcaatgaccccaaatccagagaacaacccacttgataagagattatcaacactgcaatctcatttgatgggtttttatgtatcttggctgctttagtcactatatcaataagaagccactgaaatgtgaatgagttgaagaattcggagataatgatgtggttgcctttgaatttgacttgtcacaattgaaaccagagtgtgtttgcctagctaggatgttcagactcttgaggggggtgaggcaagagggaggggaggtaaacagagggaggcaggttaaaaaagaaagaaaacgaaacaacaaccacaacaacaaagggaaattatatctttaaaaagagaatgaaagacattgttacctccaaagtcaacttggtaactgagctccgacattgtgtaattgactttgcaagtagaacaacagcaacgtaacaaagaaaatgtcagtgttttcacagcaccaatctataacgctgggaggccgtcccgctgtcagcgagggctgacaatacaatagctttcaaagggatattaccatcatgcttttattcctgacatcaatcaagacaaagagaatccttttcacaagacattaaaaatcaaacctttgtgcaagaagataggtaaaacagcattctccttaaagacagccacatggagcaatcagctaattggcgctccttgaaagcggtaaagtatttttatttactgagtgtacaaccccaatcgttggctgccaccgatcctggcaggtaagctatgaatcaaaagtttccatcagcatttcctcactcacttcaccctgcctctcccacagtaggctgagggagctgacagccagccccaaaaacttcaagcgggatgtaaccaatccaggttcaattcatccattttgggtgggaaacttctctgattacccgctaacatgtccatgcacaagatgcccttgcaagctgacgggaatttgcagaaattgtcaaattctccaaccacagtgtatcggggttttcctggctacccaaataatggggaccccactaacagttttcaaggtattctactgtaatcaacctagactcacagatacgaaggaaccctgatatcttctgcaaatgttttcaagacatgaagataataccctttgcaaacaccagcgtgccgtggacaaggctgggctttgcttcagccagtggccaggaaagccaagtccatcctaacctatgtcaaagagtgaactaaacgcacccaccaccttggcaaaaacgatggggccatcaggaaatccagccatcctctgcctgcttactttcgagacagtttcagatgcctgcatgtcagaagttgttgacacttacagaaaactgcaagtccagaagcaggaagttagagagcctcatgtttcaaagaggtcatttcccagacactttccaagccactgacatctcacagccttccaaccttccaagatgccatgtccccacatccagtccaggcttgacagagccactggtctaggtggtcacaagtctcagaccattgttgaggaggagtgggagcaagaactatctctgcaggagggctgtcgggaactcagagccgaaaggctctgtgacttgcccctttggtaccctacagaccacctgccacaaagtccagtcactcaaagacagggaaagcactctcagcatctgcggcagaaaaggatgtttttacttttcagctataatgggataccgttgttttatttttaaacagaatttgaacaggtgccgttcacttcactacagaatggacagaaattttgaaagaagagggaactggtcctaacactgccttgaaaaagcatatactcccaccaccaccacctaaatcagcctttttcaaagagccggggagcatgtctgcaccatcagcctcagtggtaggttcctttcgtttacacatccaaatgaacagttaagagaaatcaatgcatctaattgccagactattaaatcctacatcaggggaagaattccacagccactagcttaagagttggctaccgatatagcaattattgcaactttctattagattgaaccagatccccagcctttcgtctccagctaggaacgctgtactcaagtgctccagtttcctgccttcctggttccccctcctcctcctcctctgttaacacactgtagcatgccacaacattgccagggctggctgcttcttctgaattactttatgactgtaaagtcacccgcattttgcacctttcattatgaatgcacgctaggcacctcatggttaaccgtttagcaggattcccctgccagaggcacatagttatcttattttattgcttattaagtttttgcaaggaaacaggtgtaagaatctaaacagcaattactagacgtaaaggatgttttctagaatgaaacaggccctaccaaagctgggaatcgataacttaattgaggaggggggattaaacattaggattaaatgttagctaccccactccacatagaaagctaaagaccctataaaggatttgttttgcccttcctacaagatcatgtacatttagccaaacaaatctcgacaatttatacttgtatgtggtctcagctgaatcgagaaacctgtaacctcagaacgcctctatttattacatctcaattatttccatggaaacacgcgcagtgttcccaagtccctagaccaccaaatttataagatggacttagaggagctacacgctggcagaagaggaagacaaagaaggggaagggagtgccgagaggtcactgggggtactttgggacgttggggtgggcgggtgtatggacatagcctgagcgctaattaatattaagaactgtaattaacaggcagttgctagagagagaaaattgacagtattaaaattattcaaaagttttaagctaaggcaagggaaaagatgtatcaattttctctataaatgaagaggctgttgcatggatctgagaaagccatggggtgaaaggggacaggcctccttaatgttgagtgacagagagaactgcagtggtaatcgttaaccaaaccacctgatatcatcggccgaaataacatcagtgagcatgatgagaacagcccgggaaaatgaggccaaaattatcaaagagaacaaatcactgcaaccaccacaccataccacaccaccaggaaacaaaaaaggggagaaaggtgtagggagggaaaatcggtcagaaaaatgtgacttttataacactcccggctttagggttgtttttttttaaataaaattacaaggcttctgaaaaccaatgaggctattctcccccctcccctagtgccccaacccccttccctatttactaggtgtcctccctgtgagctgggttttccaaagaaggacaaacacactgcggggacaagggaccccactccagaagggaggttgtgtccgtgagtgggaagtgagaccaccccagcccccagaggccagttttattttcaaagcagcaatgcctgtgctttcaaatcacactttctgagcatccattcgaaattgttgtatttctgtctttccttcctgctatggactttcacatttccgagatcaactacaaattacagtcaagcgactttcacagcagaatgctcggggccggggaagtccacaaagcctctacattagccctgacacacagcagtggaggcaaaataaaataaaataaaatgtaaaagacaccgctgttccttaagaagcactttcaagcatctttaaaggtgaagaccttgtcgtttcaaacacttggtgtggagctgtccacactcaagcacacacttttgaatattgcttaagagaaggggcggggcggggggggagcagttcttgaaaagcaataaatccctcacctgctggaactcttatctatccaaattatcttctctcttaattcctcccttgataagtggccacatctccaccctcttcaccccagtaaacagaataaaaggtaaaatggtgagagacaagggttgtagctgcttttggaaaatgcaaaaagccatgggaagaatcagggggtctctgactctgcggacagaaaggctctgtgtggctgatatttacaacaccgagtctcgaaatgcctccactggtctcctgttcaccttgctgcctttctcctaccaacctgcttgaactgtctgctacacatacacacatacacatttgagagaggcactcactaaaaatcatttcaaggctcatttcatgaaaggctgaagaccaattcttgagtccttctcagagatccacagagtggttttagaactcggttcaagcaactttgaaacacccacccatctgttcactgcaaactgctctccttttgctttctgggtctcgccgtctaacgtaaggaggtttggagaagtggattggaagtctaggtaagcaagctttgcaaactcaaaatcaactgcctgagttaaataaaactgtttttccaaccagaaattccaattccacattttcttctgggtcgcctcttaagtggctcctgaaggagtgagcagtgagccagggaaagagaaaagaaatccagtattatttcaagccgtacagcccttccatcagcaaaagagaaacatccacccttctttcccgtcctcttcttggagtctctcttctggtttccctgtcccccaatcagaacaccctctgaacccccagttctgtggagcaggccaggctgtcccggattgggagaccagccagggtgaggcgaacaagaccaacttctctcagggaaaaggaggagtaggaacgggccgggcgctccgtttggactcagttggtctccttctaatatgacggggaggatctctgctgggccgggggcagtccctccggggacttcaggaggacagaactgacgagtgtctcaagatcctccttgccagattcagttccagccattccagccaggcgcaaggctggcaggaagggagcggggccccagcgccttcccgcgcaggcctccaggaaatgaacttttcagagcagaactgggctcaggccagaggtcatcaggggagatgggagaagacaagggcctgggggcttttggctccgtagacttagccgctctcatcgttccccccttcctcgatcatctcccatctcacagccgagcgcccgggcacccaaccgaggggctagaatcgggacaaagcagcaggcaaggcctggaaaggccagccgcggggagaggaggccaggggaggggctctgctgccggcgcgcggcctttccccggggcctctactctccaggggtcccctcgagctgggggccctcgctggaaatagaaagcaaagcgtggagacgaagggatgggtgtgtgtatctatatatctgcagctccccacaaacgcgcgcaccccggggagccagcacagaaagccggcctgggtgtcgagggtgccggtgcccggggtcagatccagggtgccggtgcccggggtcagatccggggcgccctccgcggaggggcgcgcaccgcggccgctgagctcccctgaggacctgcgtcccgccggcgccgtgcagacaatgaactcctggcggaggctccctgcccggtgggcctcggtggaggaggcaggaagtgcaggggcccgggccgggagaaggcctgggcaggggcgggagggggcgccaggcggccggggcgagggcgcggcgcccggggcgctcgccgacagcgcccgccgctccccgcgtcctcgggcgaccaggcaggggccagagagagccagcgaggcccggggccagcgaggagcggtcggcctgccgggcgcccgtcctcgccgcctcttccttcctcctgtcgcccgcccgccgccgccgagattcgcaatccccgccaagtcgggccagcaccccttgattggccacacgggcccgggccccgcacggagggagcggcaagggccccttagcggcgcccccaggcctgggtcccccaagggcgacggcgccgagtccgggcagggagggtgtccgcggcgtaccccctccgccgccgccgccgccgccgccgcctccgcctcctgctcccggcttcctcctccccctcctccgcctccgcctccgcctccgcctcctctgccgcctcctcctcctcctctcggctcgctcgcgcgggtccccggcagccagcccgctcgccggtccctcctccctcgctccctccctcctcgctcgctcgctcgcgcctccgccgggcctcgctcgctcacctttcaccgagcgcggcttcgcctgcttccgcctggacatgtccggggctccgggcgctccgtcgccctccgcagccggctccccccgccgccccccgccgctccgggcagcccttctcccccttctcctccgcctgtctcttggaaacttttttttttgcagcccggttggcggctgtggggagcggaccgcaggtccggggcggcctcccttgggggggcagcccgggccggccgaggccgctcgaaggcggggggaggcccggggggcgcgccggggccctgcctgttgcaatgcggcagtccggggctcccgatccaagcggcggtcccagcggcgcggggagtccggaggccactcggccgagccgagttatgcaaaaaaaaaaaaaaaaaaaaaaaaaaaaaagccgcccccctcctcctcccaaccccccgccggcccccggcccctgcggccccctccttccctcccccaccctaccgccaccctcaccctcctcctccttctcctcctcctccgccccttgccggatttttgtgcaaagtttgcaggcgtccggccacgcagcccggtgcggagctcacaatgaacccatctgaggagggggaacggggctggagtcgagggtatctcaaggggggaggagaccgggaggcggtcgggagcgcggaagctcagtaccccccaggaaaaaaaaaaaaaagaagccttcgaattatcccctgccgcacaaaaaaaaataataaatattaatggctcaaaaatgcccaagcgcctggtttggagattatgatggatggggggcgggggtccctcaactcagcctacttggaggggaggctcgaaacggccgcagtggctcggaagccgcggctcggggcccctggctcacgcccccttctctggctctcggatcggcccggcgccggccccccggaggaggaaggggcgcgcgggggcgctcaggcggcggccggcaggcgcgcccgtgccccgggcatcgctcagcccgtgcgccgggccgccgctgcctgccctcgggctgcggtgctcagcgcgaggcgcgcagccgatccccaggccggtgccaagtcgccggccccgctagctgcctccatgggccaggggctcggagaggggggaggcggcggccgcggtggcggaagaggaggacgagcaggcggcggcggcggcggccgggctcccgtcctcctgggcagcggcggcggcggctgcgccccggctcctccgcgctccagccggcgccggcccgcccgccagcctccctcgcgctcctgtcttctttgtggtcgctggctctcctcctcccgatccggctgctggggctgcactgcagagacacataataaagccaggcttggctggaaatgtagccgggtcccagcaggaggatgtgaggagcggagtcccggcgggggagcgctctgatcccgtggggcgccccgcactgctccggctcggatcagacggagagagggccaacagcaccgagcgatggacagcgctggaaatacagctccggccgcccgcaaaacccggaccgtggtggcggcggcggcggcggcggcaggcacggcgcgggcgcgggcaccgcaccagcacgcggggccggggctcgggcgctggctgcaccgggggcaggaggagggaacacacttagggcccacgcggctgtcaagctcgccaagacgcatgagcctcacaaactgtaaaaagtgaaagaatgggggagcaaacggagttgggctgccctagtattgccacctcgcgatgtatgcctcacgcacatgaactatccagggacctggctctgccaggttggcttttgcccaccggtcggtgttcaaagaccacccctgccccacatccaacaaattcttccaccactgggctaaccccgtgcgccccctacacccttatttgtagaattctcgcgcctggtgtgcacttcctctgtccgactgtaaaaggaacaccttacccctgagaccttgcaggagcaccccctccccgcgcagttgtcagaagaaataaaccagctgctactttctgcgaggttttacccagccgccagggggcgccgcgcgtcccccgcagctcctgaaccggctgagactctggtctccgggcaggcccgggaagggttctgacttgggaaaagtcttccccagacggctcccctaaaccgttcctcggagcctctccctccccaactagctgcaggcggccaggtctcgggtggggagcggccccgacctcgcccccctcccgggtgagtggcgccaccttgggccggcgcgccccggagccaggagaacggagcgggtgcacggcgcggcgctgggggttatcaatctctcggatcgataagttgccacttggagaggggagggctacgtcccctcggagacgagttacccagggcaacctttcacggaaaaacccgctgcccgccgagaacagcgccggggccggccgggccgcggcgcccgccccacgcagggtgcccgcgccccgccgctccccagcctgccggccagccgggcccggccccgctcagctctctccgcggtcccgccgggccctgctcgccaaccccgtgctgggctgattgccgaggtagatgccacccacgcacccccgcggctggggagcgcgagctggaggatgcggagaggcctgaggcaggggggccaggcgcgcgcgccctaggcagtctcagaggtagagtcgggtgacgggctaaacgcgacgcctagctggacaccctgacagcggcagcgggcgagcgaggctccccagaggggcggaggccaggaccgagacgtcccctaactagacctaagccttgagggccgcccctccccaggttagcgctaccatccccaggccacagtcctccccagcttgtgcgtccaagagtgtccaacatctcggccttcccggagggaataggagcccccccccccacgcccccgcggcccagggatggacggagttgggctgaaccgggggtgccaagggccgaggcgagggcaggggccgcgaggcgcctgggaaggagccaggaaggaggggcagaatcagccgctcccccacccccgccggcgcctgggatcgaggcccgcggagagtggctgacaggcggcagatggcacacgctgggggagggggacgattggcctcggctctggggtgcccccgccgcgggctgcctctgctagaggtagggggcggggaacggcccccagctcgcccgcccaggctttctggggggctggagattgcggatcctgcccagccgggagtctggagagtgagggggcggacaaaaggagcgcggtggggaatgcgtgtgcgggacgaaagaggggccgtcgggggagaggggtggttggagtcccacggggctgcccttttccacccctaggggcctgctgaagactgaggacggaggtgggggcaacaggatggggagcccgcaatagcccatcctgacctaatccgaaaggacgagatcctggagccgctcacaaagttttccgggccccctcccacgcgtcgcctgcacgtatgtccgtttcccgacgctccgccctcccccgccaagttcggcgtctcccagctcagcggcagtcagggtgcagagggagcccgacc

SEQ ID NO: 686 - DNA, 188637 bp, Homo sapiens
  source 1..188637: mol_type = genomic DNA
atgtttctgtagttattgtttgcagcactccgtgtaaaaaatcacgttcatttcaagaagctgttatggtattgattgtggtaaagacttccattaactgaccaatctaaatctcataagtgatgtcaggatagttatgcatttgcttggttcaagtattcagccattatgttagaatgcaggcagtgtctgaatatggctgttaaattatttctaaataccgaaccagaacagcttaacagttctgcagtttgagactgacacaaaaatgacaatctgccacctctttgttttttaaatattaacgctgtattgggatagtatttttggagtaaaaacctgtggcacgagaggataagtgacataaacaaaggcagctgggcttcatgaaataatggaacaataaggcctttgcagccgctctcatcactccagtatgttaattagcattctgttgtggccgcaacactgaaaacatgtaatctgtattggtgtacagtacagctgtgaacacacattcttttttgtgagtccctggagttagccttgccattggcatatgcgtttgggccaaaagtcaagccatcaccactaaaatagcacaccatagcagcaaaatgtcatttgtcttttcttgtttttttttttttgttttttttttctctcccctcaatgccacatgctatccagtgatgtaatctagtatcactgcatctgcctccctgctgtatttttgcaggagggtatctggatatctgtaggggaaaggagggggcattgccagccagcaggagatggaaaaggcagcggccccaaaagagtcaaattagaaaataaattatttctttttgcattatatgtttaaatgcatatatagagaatatatatatatatatgcatatatatgtgtgtgtgtatatatataaagagagaatatatatacattgaagaatctatgcatttaatatctgccacctttttgcatagattcttccttaagtgtcatgaaactagaatccgctgcttgttttcgtaaggtaaaagaagggcagttaatttcagcaccaaggcttggaggaaatgagacctaagaaaaaagaatcagagtaaaatttacccttatttatcatttctatttagaactgggttgacagtctttcatgcatgtacttaggatgggattggctcttcccatttcagagctgacaaaactgaggctgaggcatggtccaaagatgggccctaattgcagggcctttctggcctctgtacagagagagtgaaaacaattggtcattttgagggaaaggggttagcaccagtgagcagaggcagttagtagctgggagcagtgactccagccttcagaggcaggactcagaaaggcctctcttgtgtgattttgctgctcacacgtggcctgctgggagccgcccctggtactgccgggacacggccctgggattttgctgaggccagctttggaacaggggaggtgagtctggagaagagagtttccacgttgtcatcataggatctggactcaagtgaccaaaaccttgcttggatttttacctgatgaagtttgtcttgaaaagtgaaaatggttccatttccattttccctgttctcaaggtaattcagctttctttgtgtgtgagtgtgtgagtgtgtgcaagtgtgtgtgcgtgcagtctccccagcatagaacacccacacatgcacccacccacatgcagacacgcacatactcatgcatggattcttgttcacgaagtacacacccttttgcaaaataatttttgaataaaaaattatagccctttaaatttattataatttagaaagggaccatccgatggttaaaacttttcctataattcctacattaattctctccatcacccgccccccccatctaatctgactgtaccaaaagatttgaaaacaaagcaaaaacaccaaccaaccaaacaaaacaacccacctgcttctaaagtaactttcagactccctgggcaaagattcttgtctctttctgaaagatgagcatgaattctgagctccaaattttgcttttaatctgtctccaacctaattgaaaaattaccataccacacaaagaaaactccgcatcgggatcaccatgctgatccaattgggttctgctttttgacgttagagaaatcaaattgtctggcgatttggtgacatgcttgaatgtccacctgggagaagactaggttaaaagttaatagcacttgtgcttttcttccccccgacctttttttaaactccagtagaacggaactcttccccactggccaggccctcatcctgaatcccttgtccagcctggaggtcttctgagagttctcagttggcacctttcccctgacttgtccctgtgaggtaaggcagggctgacactgagattttagttctgttgttcttttttttttcctagaaattcacaccccccaccccttggttaatggctctttaaatattgaaatgcctggaaaaacaaaacaaaataaaataaaatgcagcctgtcaaagaaataagaacaacaacaacaaaaatgttggtatcttttagaatgtgtcttcctagtggtaaaagtatataattaataggagaattttcctccagatgtggctatactataatagagccttataaatgctacagaaagaaaaattgcttggaacgaaggcgtcctcaatgagagcacacctgggtctgacaaagattgcatttagggactgctgtgctatcacaacgcagagaaagaccaagtctctgggagcagctggagagaaagccccggcaaatctgcatgcaaatagcagcacattgttaacttaatcagatgccgaggaaagatgtgccagaattccaggatgatctacacacacggaggaggagcggcctgagctgcagtgggagccggggccaaggtgggcctcagcaaggtgcacgcggcccggccccagccccagggccgcagcccacccgccgcccgcctgttttccgggcctgcagtcaattcaccacataatgcccgattcgctctttgcaaagatagaaacgatagagcgtatttcaatgggatggaagctttattattattattttttaatggtgatataggtatgggcattatttcgcctgagtccgtaactccaattaaataatatttctgcttaaatatccgggtgcatgaagataagaaatattgccctggagtgtataaagaaagagtttttttttcaataagaaaagtagttctctataggttgaagtgctgggtataaattgcaccttaagaagaagtggaagacacctgttatttatattttatattaatattaatggaaatatatatatcttaaatctccatcttttagtctagcaccgtaaaaaatataaagtaatactatttaatcacccacagcttaatagtgccttagttgtttactgccattgcactaattgctctgtactaatgtgtttttctgtgatatccagtagtgctaagagaacagagatccataaccaattaaatatagtgtttttttttaatgttaaaaatatatctggtgaggctagaaaaggaatagaaaccgccctgaagaaaggcgccttggcaccgcctcggtgcccaccagaaggtgcccggattgcctcttttgcgcaaagacaaagggggtaattttttggcaagaaaacaaacccaaggaaaacacaacaaactgagtgttgtttttttttctttccctcctgcaacttctcggaccgtctctgccctctctcctccagagagggcgagtttcatcctggagggaggccgggggagctgcgaggccacccccagccggcgcccgggcggattgcgagcccccgcgggtccggccgggggagcggagactggccccccgcccgggctggggcgcctgccgcccgcgagccggaagagcgccccattcacgagcaggcagccctggcagagggttaattgaggatcattgttgttggttccaggaggagcgaagcgcctggagatcgggcgcgcgggcgcggctctgggagcgggggaaggtgaggggaaatgggacatgatggcattaataatcgttaccaaagacggtgggagtaacaaaggaatgcgtctccgagacgccgcccagccccggggtgttttctggcgcggtcgcggtgcaggaacgcgagccccgccgccgagcctcccgccgcctgcgttcgttggcgcggcgcccggcggtagtgccaccccgaggccgagcgctgcccccgccggcccgcggctgccagccggccctgcccgcgcccgggccccgcgagcggccgcacttcaccttacggaggggagataatgagatcaattagaggcgccgtcaccgcgccggagacagctgccgccgcatagtaatcacccgcgggctgggtgcgcgggggctccccgctacctgcgcgcctgctgctcccaccacgcggcaccgacccgggcgcgcccccggcccctgtccgcagcccacagccacaccgcgcaccctacaccctccttgcgcctctgctggggagctcaccccctccactcgcacagtgcgctgcggcccggggtgtgggaggtcccgggacttggggtgtgagtgcctgtgtgggggtaggggcaggtgtccgcttgtgcgcatatgggcatgagtgtacatggcgtgtgcctggagatgggcgagtgcaggctggaatgtgccggcgtggcacgtgtgtgggcccaaatagatgcgtgtgtgatcacatgttgtgttcgtgtttgcacctcgtgtgcctgtgtgtccgtatttgagtgcttacaggaatgtgggtggtgagtacccgtatgtgggtgctatctgcacttgtatgcgtgtgtgtgtgtaggcgcgtgtgtgtgcgtgtgtgtgttagggatacgtgtagatgtgcattagtgtgactgtgtgtgctcatgtgcctgtgcacgtgtgtttgaggtttgtgtgcatgggtagcgtctgtgagagccatgtgtatatctgcatgggtgatgagtgtgtgaatgagtgtgcgcgggtgcccactccatgtgagtgtatgcccatgtgtgtgcttgatgtcttgagggtggggacagctgctgtagcgccctctccctcaaccccttgtcctctagtggctccatgggtaccaaggtttctttgccaggcagttgtccctgaggaaatttccagtgcccagtctccctggtccataccttggcatcccctctcccccaatccctatacacgcctttgttgagggtgatggtgatggtggctcttgacctccatctgtgtctttgccctggtgtatttgcctttgtcggctggccctgttccaccccgcagagggcgatggtgtctctgacctgagcatagaggtgccttgccatttgctccaccccagccccctgcctcccactacttataccagataatgaggctgggaacagccaccagagccctcacagacccagggtggtgcagcacctgtcaatttcacacagatagcacccactggatactccgtgggtctgggcagggcatctgctcactttcagaaacagaatgggccagggtctgaagaagagtgggaagcagctgtggtgggagtgagctgtggtgggagtgtcagtgagctcagggcctttgcatgggttgtttcctgcctggaggcacttttttcctgtgactctcagctccatggtgtgggttccctcttcagcacatcctccctgacactacccagccagtattcccattcagtcactcacattgtccagttgactcccttgactgccgcctggctcccccattaaagcacatgtgcctccccctgccccgaccccacccccaggctaggaccttaccttcgggttcattgctgcgcccagcatctggctggttctgtgtgcacagtgggtacggggcagatggccaacaggtgtttgcaggcctctgctacttggctgccctgtgggctcatagtccatcaggggaggctggcaggcatgctgggctagggacagggccatcctgacatggggaccctggaaggggatggagcttctctgtcatcgagagagccaacgtggcctgacactggggcaaagatgtgaaggagaaagaaaggggacaactgtctccagacttgcccactagactgaaggcctcatgagggcaggagcctggctcaggttctcgggaaagctggcagcccctctggtctcagagcctcgggatgtggtgggagtcctggatgttacccgtgtgggccgcgctcacagaactcattgtgttacaggaccccaccactcacccaaagttagcctttgggccaggggtttccacactatagtcgcttctgtggtcgccagaatgatgttacgggaaagaggtaccgatccagaccccaagagaggcttcctggatcttgtgtaagaaagaattcagggcgagtccgcagttcaaagcaaaagcaagtttattaagaaagtaaagtggtgaaagtacggctactcgtagacagagtagggcgttcaggaaagtaagaaaaggaatgagtccaccctaggtccaatgctcgtatatataggataaaaaagatcatggggagatgtgctctgctacaagggtttgtgaaaagggagtaattttcttaattactatattttgcaagaattgattttattatctttaaagcaaaattaggaatgcctttgttctcaagatattgggatattaggatactcccaaatctgggtctgttgagtaaccattatcaatctgctcccttaaccataaacatctagcagctaggaatacctcactttctgggaatgcagtccagcaggtctcagcctcattttacccagctcctattcaagatggagttgctctggttcacctgcctctgacagttgggtggattctttgttgcccaataggctcccaaggccaccctctccagctgctgggagtctaatttcaaccctgtctcctcaaatcttgtgcccctgaacaagtgatttggccttgctgatggtctcaacatggtctgagagtccctgtgctgtcttccctaatgccaaaatggacttggcaatgagtggaggcttcttagtcgccccagcctggatgccctaaccaagtttgggtctactttttatgtttttttaaagacaaattttcactcagtcacccaggctggagtgaagtggcacaatcttggctcactgcaaactgcctccgtggttcaagccattcttgtgcctcagcctctcaagtagctgggactacaggcatgagccaccatgcctggctaatttttgtatttttagtagaaatagggttttgccatgttggctagtctggtcttcaactcctgacctcaggtgatctgcctgccttggcctcccaaagtaatgggattacggatgtgagccaccatgtctggctaatttttatatttttagcagagatggggttttgccaggttggccaggttggtctcgaactcctgccacatttgggtcttcccacacatgctagtggtgctgaatcggggtggtttggctccatctgagataatgggaacatcctggctgctcttgaaagttctgccttagacccaactgcatctcccttgaggtctctgcccttcattgtcttctttccatctcctgcattgctccagccgaggtcccttttgctctaaaggagtgggacaggaacaaaaactggtgaactttcttacaggaaagaaaagcatgaaaccttgagtgccccttaacaaggtgggagatggcttgtctctgttctggacctcccgaagttgttcacttcaagttttgaccccctgagggcctcctgtgtgcaaaacgctgtgccagtgctggagggacaaaggtgtgggcctgtgtcttgtctctcccaaaggatgttgacaggggtctggatttcccagagtcccaggcataaggagtgtggggagggggtgatagctccagccctgtccaatgctttggtcctgaagatgggcagttggaaataacacatgtgccgtcaccttgaaaacctcggtcaaatattgtttgaaatatggaggtgatggttattatttttatgtcccaaatgtgatttgttttgaagtttgtgtattctcctgactagagctttcctgacaataccgtgggaaggtttgagtaaggcatccctctcccacttttgtttgtgagggtccagttggtcctggccacttcctgaatggcctctgtgttgggagctcccggtgaggataagaaagagaagccagcctgagctctgtgctgcccggcatgatgacagtgatgtggtcttgattctttgagcgtcagtcatggctcccaagtctggcaaaatggactcctggctgatgtcttctccactgagcctctgcaaccccagtgcgtcatgggggtgtgttgaatgctttctgtggggttgattcctgtcgccataaggaggatggggtggggcagggatgtatcatcgttgccaggagatctgacaggtggaaggggtgaagggtggagaggatcatgggtgaggaccagaaaaggaggggtggggcttgagggtagacaagcagaagggctggggggtgtagtgggtatgcggtgggaggtgggacgatgcccaagtaggctgctcaggggtggtgcagggtggatgaagggaagagatgccataggtgggagtactcattccactggctgcaggggatgctgtaaggggtgctgatgcagctttgcaaagccaccaaggcatgcctgggacctcctgtgactgcccgtcactcaggagctttctctgtgccaggcactgtgctaagtgccctacttaccttgcctaatttcatcttcactggggaagtcctggcgaaggagctgaggcttttgatctgtgaatgagagagctcagatccagaggggtaaaaatttgccagatgtcacagagctggccagtgatggagcagggacttctgagcccaggccaccaccgccgaggacatggccactcttcgtgtttcctgcacagagcagctccagcagggagctgagctgaagaccccaacagaagaagtcaaggcaaaatatagcccaagtcctagtgcattcttcagggagggcctttctgtgaaaacagatttttttttttgccagccgtcagccttttgtcccattttcacatggcccaattagacaattgcaccccctaattagccagccttaggcactacttgttgcctgcatagaaattcacacatggggttaaacgttggcaggaaacttcgtccttgcaaatgggagccgtggtgtcagtgttggagacgggccaccctgcagtgcatggcccagaccatgctaaacccagccaggcccacgagcacccccggagaacccacggctcggccctgagacactgtgaggccacgtgaatctgagttatcagtggccaaaaaagaggggagacacagaagagtcataaatgttaacttttttagcactctgtaattccaaagtgattcaactgatttgtttcaaactctgcaggaaaacccagctgtggcatcagatgtgagccctctcagaccagaaggaaatctcttgcccttcgatgcttagccttaaggcagtgagagggaggaagctgtgttctgatttcccttagaagtgcagcttcctgaaggaggagtgtgtggcattttccagaagactcaggtctggctgcttctcagcaaggaatggtcctgagtccacccaggtgcccgatgcgtgtttcttatttattttaaaataaatttatttatctaaatttatatattgttacatatttttaatttttaattttagagacaggggctcactctgtcacccaggctggagtgcagccatgcaatcaccgctcactgcagcctccaactcctgggctcaggtgatcctctggcctcagcctcctgagtagctgggactgcaggcatgcaccaccatactcagctaattttaaaatttttttgtagagacagggtcttgctatgttgcccaagttggtcttgaactcctggcctcaagctatcctcctacttcagcctaccaaagcactgggattacaggtgtgagccaccaccatgcctggtctatatatatctaataatcagcacaaaccatgcccccagagggagctaatatctcttgattagatcaatgctcctttgcatctcctatgtgccaggcactgtgctggggactgggtgacaggcaagttccttgtttaagttatggggagggagaaggcaggggtggatagaggctacacagtcacctcatacatgaacaggattattcccactggaaaaaagtggaatgtggcagggacagggtgcctcattcagatggggtggtcttgggaggcctctctaaggaagtgacgcttgatctgggactggcatgggaagatggagccaggcttccagacagtgggatcttgcagggcacaggtcccaaggaaggaacaggcctggcacgctggaggatttggggctggagcatgagggaccagggaggtgagatgggaaattaggccataatggccccaggtcccagagcctttgcaccattgcaggctggggcaaggggctaattccaagggccataggaagcctcaaagggtatggatgcggggtggttgatggggaacgttgtaaacaggctttctttccatggcaggggacagtgcaagggacagaagcgttcagagtctgcagggaggtggagctgaccggagcgatctatgtggttctgtgtatttcatctcttggcctgtgtgtccccatcctaatatccttgaagtatcaaagcattgctaaataaatacccatgaagtttgctacaggggaagccagcaaaaagttcttaatttaaattcttgttttggaagagaacaagcagagagaagagaatgctttccattccctggtttaagtctcaatgaaaatggccatgtgagacattttgggtaaaaatgaccttctttggctcccattttggctgatgtgttcacttcttttccacggattgctacctcccctccctgctgcccccgcctgcaaagagacagctctgcatccatgtcccatttccgtgttatggctagcgacagacacagttattagaagaaagttgtccgatttgaattaagcataaacatgtcagcttagtggtctggacaccttgtaagtccttgtgcatcatctgtgcaaagctcttatttgatggtttgatgaagtttcggcaactgcatggtctatccagtgcctcccgtgctttttctccaagacatttgggtggaaaatccacaaaacaataatagatcaatacatttaaattagaactttcaaaaattcaataatggtatttacaaattaataaagcactgtaaagaaaatatctgcacttctttatttagggatacagttaattttttcattgattaagcattcttttggtggatgggatgtgggcagggaattttttttttttctaagaaggaagttctgtgtgaaaactagaagtatttgcgtgtttttggtcccacttgtaagttactaatgcatcacccagacaaaggccgatagtgagggaaggaagtatggcttggcttggcagaagctaccgcagaggtggaatccactggatcccatgtgatctacatggttgtgatgaggatggagggaagggcaggtgtacaaattcctgcggtgggcggctctgacttctgaagcacacaggtgttaactgtgtgaaggaaatttggtataggaaattatcatttagcaaacataaaccagggagctactcttctttgtgcaaaagaatttcccatagaaatccttaaaattagcccagatagtcttgcacaattaaaatcaaatatatttctttttctcctcctaaaaacaacaaacgtggcaggtgtggtggtccacgcctgcaagcccagcactttggaaggtcaaggtgggcggatcacctgaggtcgggagttcgagaccagtctggttaacatggtgaaacccagtctctacgaaatgtataaaacttagctgggcatggtgctgggcacctgtaatcccagctactcgggaggctgaggcaggagaattgcttgaacccaggaggcggaggttgcagtgagctgagaccatgccactgcactccagcctgggcagcagaatgagactctgtctcaaaaacaaagaaacaaacaaacaaaaaaaacaaatgcaactcaggttttcaagactatgcctcctgtatccaggaaggtagatctgtaccttgctaaggtctggggtctgcccagttcagatggtgaacaactgagaaagagttgctgacaagttccaggaggccctgtggaggtggctgcaccccaccaaccactctgctagctggatgtggacacagcctaaaccacgtacacacctgcatgcctgtggcccagggcctgctactcacttactcctcccctttatcctctcttcttctgcccaccttccttcctttctttctctctttctctttctttcttcctttcttccttcctttctttctctctttctctttctttcttcctttcttccttcctttcttttctttctctttctttctttctttctttctttctttctttctttctttctctttctttctttctctttctttctttcttttctttctttctttcttttctttcttttctctttctttctctctttctttctttctccttctttccttccttccttccttccttccttccttccttcctcccccctccctcccttccttctttctttctttcctttcttcctttcccttcccttcccttcccttccctcccctcccctcccctccccttcccttccttcttccactctgccagctggatgtggacacagcctaaaccacatacaccacctgcatgcctgtggccccacggtctgctactcacttactcctcccctttatcctctcttcttctgcccacctctttctctttctttctttctttctttctttctttctttctttctttctttctttctttctttctttctttcgtttccttctttctttctttctccttccttccttccttccatcctccctccctccctccctccctcccttccttctttcctccctccctccctttcttctttctttctttcctttcctcccttccctttccttcccctcccctcccctcccttcccctcccctcccctcccctcccctccccttcccttcccttccttcctttctttctttcccaaaatattgattaaggacccatggcagaccacaggctgtgttaatgctgggggcctggtggcgaagaaggtgtcatggccaagaccctcttgtggatgcacgatcccagtgggctggcacaaagtggacacccagtgcttttcctattgaatcatgtcctgggtgggaccctgctttggttgcatgggaccttcaggcatcgatgtgggtctggacacaggattcttcttcctgcattggatggaaaccagaaacccctgtggagcatgagggtcaaaggtcatccacttcttgcaccctgagggttgagagaggaggaatggcttggaataggggtaccaaatggtgtttagaaaatatgtgttcagccaggcatggtggcttacatctttaatctcagtgctttgggaggccaaggtgggaggattgcttaaggccaggagtttgagactagcctgggcaacagagcaagacactatctccacaaaaataaaataattagccaggcgtggtggcatagcctgtaatcccagctactcaggaggctgaggtgggaggatcccttgagcccaggcagtcgaggctgcagtttgatcacgtcactgccctccagcctgggcgacagagtgagatattgtctctaaaacaaaaaaaaaagcaaacaaaaaacccagctccacctcccattggttgccagtccttgtcacctgcaggataaaggtctaacacccggacttgatgtttgaggccttccctgcagcagctgccccaggcatccttctctttcattcagggtaggaagggcctttccaggagcaggagcagccctgaaatcgggtggaaatggacatgaggaaggaagagccggtggtggagtttgtctagcaaccgcccagagactgagggaggtgatgacccgatgggggtcagtgtgggttgtggtggctgaagcgggaccaggggccacctgcctggggcctgggtgccctgggaagcagtgctggttgcactggggggacagctgcctgacgggtgtctccctgtgggctgggtaacgaccgttaccctggttgcagtgcttcctctcttctcctggagttcctgactgtcctctgtggccttgtcctcattgctcttccctgcttcacccactggttccagtccttgtcacctgcaggataaaggttaacatccggacttgacattcaaggcatctccccaggcatccttctccttcttccagaccctgcatgacaagctgccatctcccagggaatgggcaggacacacctgtccacccctgcgtcttggcttttattattccttctacccatattccacctacttctccccaacttttcagacttgatggtttaccccaggtgcaactccgcctccatcatgaatctcctgtcttctgaaatctgcatgtgcgcactgcctggaggtcccttcagtgatgctgctttgggtccccagctgggtggagccacagccacatagagcatctggtgcttagtgggaccccatggagttatctgaaggagtggcagtgcctggatcactgagctggcagatggacatcagggatcatgtggcaatgtccgtctgtctcactcctaacttaaacttcgattttaaaaaatgtggcccagaacattctgatgtcagctggtgttgcatccaaggcccctcaatactggtcccatcccaccttcccagcttcatctcaggcaacatcctcccatccctcagccctttgcctacgctgtcttagaaagccagccactttttctccttcatctccactccagaaaactccctttcatcctgcaagagccagctgaaaactcacctcactacagaagccaattctcacgctgctctgagtggagttagcccctcactcagctgagctttcatctctgttacctgtgactcttctgaccatgttattgtctctctacagtctctctttatgaatgtctgcccctcctgtctcttacctccttttttgagatagggtctcactctgtcacccaggctggagtgcagtggagtgatcatgggtcactgaagagtcgacctctctgggctcaggtgatcctcctacctcagcctctcaagtagctggtactacagatgcatgccacaatgcctggctatattttaaatgtttggtagagagggggtctcagtatgttccccaggctgttcttgaactccagagctcgagcaatcctcctgccttggcctcccaaaatgttgggattataggcgtgagccatgatgcctggcctcttgtctcttctgacatgtagtgggtctttggtctacatttgccaacctcaatatctgtaggtccctagggcagggcctggcgcacagccagggctataggtattaggtatttatttgtggctttcaggaaccgatttttggtgaaagacacttggaaattagccctgcgtttcacagaacacttctattacagcggaaacagtggcagtgcttgtctgcgggtcgccggcatggacagcaggggactgcttccgagggcttatccaaagtcacagcctatcagcaatttttaagataacacattgacatctgtgtgtttaagattctggtaaaaagatgctagaggaagcaatgtgcagacgagagtcggtctgtttgatgtgtgattgaagtgtcagtggagacacacagagaaaaggtgtttggtcaaagatgaagcaccgttttcatgctgaagatctgccctcactcatgggctccaatgtcccttggctagaacctgtccaggcctcagtatggtaccagagggaggcctggatgtggggagaaaggcaggtgcttagctgatacttgcaaaggaaaatttgcaaaaggggctgtaacagagctgtcgctggttgcagcctgactttgaatcttgctctgagcaggaccgtggggacccgagacttctgcagcccctggttgctgtgggctgggccccaaagaccccattcagggaggctgatgcaggggccatgcttgagagatgcccagaacctgccctcccatggttgacggcggtgagggacccactgcctctttccaagccatttattgccacttaccacgagcttggcttacatctgctgctgagagcagagcgatcccaatttggaagccgtggaggccgtttttcacccacactgacataagccatgactctcgaagctgatgacacacttgagataaggtcaaatgctcaacagaaagggacatttgttgcttaatccctgtttgcagagaggctgcagacactaatggctggaggaatatgtggtccttgtccccaggggacctggctggaaggcagggccctctccactccatcgcttggaaactacttaccctactgcacaggatatcagggaagaggcttggaaagcccagcctagagaggggacttagaccctgcttgagggatggggttggggaatgttctcgagacgcaggtgtccaggctggttggtcagtgggctttgggccctggagggggctgtgtgatgagccaggcaccagctgggtgtctgtgtagataggatggtccataggtggagccccttagaggtcttcttcctgcttcccatgtaatctcctgtggctctcagattttgaggtcaggttttgaggctgtaagaggtgctgatttggccaggatataagtactgggagaaacacgaggggaaaagaaaagacaagggtgtgtctataagatttcccgggggagtgagtcagaatgaacggtggcctacttcagtcaacctgagttaagataaagaagaccatggatcgccttggcctgggacctcggtcaaagtatccgtatggatttcctttctgggtcttggtgctgttgagggaggtcatgtgactttgcctaaatcaagttagatctttctacaattatggatactcggtggggttaggcagggggcttggaggcaccctccagaagccttaatgggggcgaccccgctcctccagccattgtgaccactttgtagggtttattgccccagccctcatggtccactggaaggtgggagttccaccccacagagaccacccagcggtggccatgcccggggcttgccatccaggtgcagagccctccacgatcgcctcgtccctcctgtgcttggcagggcttcttcaacttcttcacttgggggaattttccagggcaagccagtgttgtaggtctaaaccctcacggtgttttcttgcatgccaaggctgttgggagaagctgaatgtgctgttatcaagagaccagttctttagaaacaaatgctatgattttcagaattaggatggagtgtaagattccttctttcttggttaatttatagtagccaatgggaagacagagagagattcctttatgggcttcctccactttccaggcttaaaatcatgtgctgggcccttctacatctcattcagacagctggcaatggccatttatgtagggtgagctgaccaactgcagagggctctatttcctggaattctcccctacaaagcaagtgtagccccttcaggaggtgtaaaggcttgacgacctgtgaggaaggagggagtcccatgccccatctctcttgatttaccaggctcctcttaccatgagccagagaacacaagactgagtgtcaggcctgcctgtttcctttccttgggtgtgggacccccctagtgtgagttcacccagtccgcacacgttccacgtgcctccacgaagccaggcctggttctccaatttccaagtagagttctggtttgcgcagcttttctactcaaagggggtatgcggaaggccaaccatgtggttggtgatactcgtgtatagggtacatttggggagaggtttcctgggagggcgagcacttgcatagagggttatcttagtgcccttgaaaaatctagcgaccatagatgggaccttgcctctcctctactctggacacgagacccttgtaaaaaaaaattccctttttgctcaagatacatgctcctcacccatggatttttaaaaaatcttgtccatgcttcacagctcagaaatctcttaacctgttcagtacagatacgactagtaatgatttgtccccaggggctgtattatggtgacactcatcatgggccattctctgcctttctcattcatgagaaagttccagactgggctaagcgaaggccaagaccagaacccttgaaggtactggcccagaaaatgtcctttgggtgaagaagtggtggtgcccttggctcctgaatcctagcagattctttttctagggactccatttctgtcccgcctaatagcatcctgctggcccaagcagatagcagagagctgctgtgggcccctccagctccctatcttccagaagggccacttggctgctgagtgtggcgcagtgacattttccaacttgagctgctaaggtctctagaaaaagatttttccagcagaattagagaggaaagaaggcttgctgtttctgatatgttttacctaagatttctcaaatggctgctgggatcccaactcctcccagggatttccctcctcaaagatatcttggtagatattcaatgggggacctcagaggtgttcaaggaaggactccatctccattgaggcaggtgctgtgcaggggaaggttttactccttcctaagcacttactgttgcctgaatctacttcctaggggttagctgcaggggggttaaggttgtgttgagtagagagaagagaagagaagcctgctaatttgctttttttcctttactttaatctttagttcagctgcccttagtataaactggaacttataaaataaaaaaatgctagggacttctcctctttctctgttaataagctcgcatgctgaaaaaggtctagatgagaagaaaaggaagcccaagtgagagtagcattaaataaaactctttagggtgaggtgggaccagggtggcaggcagctgcaggggagtttcagtgctagaaagtggagttgaactctccaaagggaaaggctggaggggctgaagtgagtacaggctccccagcccctatgctggtccccacttggccatgccaatcttcctagccaggctctttgagagcaaatcccacattctgccggagagctggaaatccagtcttcttgaggtctgaaggtgcttttatgtttccaaatctatcggagcctggagtgtcctctgtagcccttagaaacagtccatggcaaagtcagggatccccactggcagagcaggaggcaggcagccccgtgagcttactggaggattctaatcaagtgactgggaggccggagctcttggcatcaccgccagcccccgcccccatgtttacactcagcccccgttggcaccaatggggatctcaaacccagcctgggaccttgggagcatctattccaatgtcagaataaacagaaatccccacttgagagtgttatgaatcttctcaacacagcactttataaacctcgggggctacgtgcccttgagtgctggcagcattaatatttattcactagggaccaagttttgcctgcagaagcccatgctggtgcctggaaattctcctgtgatcagagccagaggcagagtcccagctcttgcactgcacatacctgggaaggtggttaggagcaggcctggaatccctcccaacacggccaaatcactcactgccactttgtccctgaggaattccaaaacacaataccacaggatgtcttgcccatttctgatcccaggtccaaagggcccaccttctgccccacatctgtcccagtagacttgactttaaactgcttttgctggctggctgcagtggtgcacacctgtaatcccagcactttgggaggccgaggtgggtcgatcatctgaggtcaggagtttgagactggtctgaccaacatcgtgaaaccccatctctactaaatacaaaaaaatagccgggcatggtggtgcatgcctgtaatctcagctacttgggaggctgaggcaagagaatctcttgaagccgggaggcggaggttgcagtgagctgagatcgcaccattgcactccagcctgggcaacaagagtgaaagtctgtctcaaaaaacaaacaaacaaacaatcaaaaaaactgcttttgttcagggtgaactttattcctggcgcttaattgtaaagaatgataaagtccaggatagaccacagagcgatctgagaaagaccaagagaaagagagaaaaaggtaaaggcacacacagaaaaagaaaaacatgctttcaaattcactgacaaacagcatcttccactaaactttcccttgttctgattgtaactcccagccaccccttagctagctgtctttgaattataattgcctctcaaactcctggtactgtaaccttaaaccttgtaattgtgccccaggacaaatcagtactaatttagctaatgcagtacgtcttagacatctctctagcctccactttgaataaggatatcctccccccttcacccccgccaaaaaaagtgtattttaggaccgatgaagcaagtgtgcatggattctaggttgcggttctcggatgtccggagctgggggccagaggagaggggaggtgctcagcttccaggactctgaggggagaagggagtgagtgtctcctctttcacagccctgggaggactctcagccacaccctttcccttgggaattccagtccttcctaggggaggcccagcgctctcatgggtctcctctagaatttgcaggaaaccagtaggaaaccacagatcccctggggcgagggaggtagggacagaaagattgtgcggttgaatctaaaatatgaagggaggttaggagcagccgccaaagggattccattaaggagaccacagaatttagccttatgaagttcatgcccatgtggagacaacgccagggtagccagagaagggttggaagggctgggatgtagaatccgtgccctgcaccaccgcccggcagcaattatctgcggttagctggttactccgagctgccaactcctgaatgccacggcctcccaactgagcctgagacatggcattttctgagccagtcctccttctttctgtgtgatttccattttttctagggtgtctctgttcttagaagtacatcagataactgctcttaagtgagctaaaattaagctcccaaacaaagagttatgagtgctgttttatttctagagatgaaaattgcacgagtaacttatttatttgactacattacattacagtagaaggaaggagaggactgtggtgcaaaacagtaattaactgttttttctctgtcctgaaaattagtgcatagttagatcaaaatatgacagggtgcacgctcatttaattttttaaattgcttggtaacttcaaataaaaccactgctgtggatctgtaggactgtgtgaatgctgaatactcaatggcattttggaaaccacttctgtatgatctgtatggcacaagatgatagcattcattcatttatctggtcagcaaatattaacgacacctactgtgtgaagctgtctctggggagcagtcatgcgcgctggggaattatgtgagtccaagatgctgaggaacaagaacaatcccctgtatcatttattcgtccatccactcattcattcactcaacaaccacttaggcaacttcatttctgtgttgaggttcctgctcacagtttaatgcggtaggatggggttgggggcgggggagaggaaatgagaactaccaggatacatatgagtcactgaggcttgtttgctgatctgatcaaaagaagcacatgcaaagccatccaagaagagggtctgattcattcatttcttcctatgctcactgattaattcactcattccaaagagtttattgaagacctactgtgccctgcagataggatgatgagtgaaatagacttgatccctctctttatggagcttacagtctggagagaggggcagatgttcgtcagagaatcacatgaaccaatgtgaaatcattagtctggcaggtgccttaaggagaggtgtctggagctcacggagcctctggtcctaggctaggggcagcgtcacattctcaggcaggggttacatggaaacatctcagggaagagcgttccaggcagagggaacagcaagtgcacagaccctgtggcagatggaacttggtgaagatgaaggctgaaaggtgggcagagtgaggctagaggcacagaggaaggggaagctgtgagctgagctggagagaaagattgaggcgacgccacagaggccttgatgaaggattttaggctttatctgaaaagcagtgggtaaagccatcatgtaatgtgaatgttgtttaaggggcaatgtgggcagaatggaagcctgggtgtttggtggtgttggacagggcagtggtggaggagatagagagaaagcagatgtgaaacatgtgtgggaagagctgcctttggtccagagatggaagctgaaggagtcagagtctgcagggctagatgggcaggcagagacagtagggaagggcacgtgcagatggaaaaagggcagctctctatcagatcagtgagcaagcctcagtgactcacactggaggccacaagacctgtaacaatgaacacacgggacccccttggatggttccttaattggtggtccaagacttttccttaaacgactttccttttctccttcttgtgttatagaattgctgaaattttctgaagccagtccaacaggtgtgcccacctattgcctacttatccgtgatgaacccttacacattgggtaattgtgtgtgcaaatgggtagttaggtatctaactatgatagtgcatgtgtgggtatgtaattactagatttgcatttgcaaatgctcatttccctaaacagccctctccccactcccacttctcagctaccctcctaccccacaacacacacatacccaggtgtaggactgggccaggtgcatctcttacgtctgctcggctgcaccagaggaagctccttcttcagcgtcccttccccattctatgcaccaccatgccctccacactgagaggaagaaaccagtgacatggccctgtcttcttccatctctggtggtaattgtttgccccacctgtaaatagtacagtctggaaattacacatgagcagttgcttttctactcccagttcagcctcacctttccaagggagaatcaccatttatgaactggacttacacaatctagtgtgcaagtaagctgcacactgagctgagctcaagagaaaagttgaggtgacaccatggaggccttgatgaaggattttaggctttacctgaaaagcagtgggtaagccatcatgccatgtgaagggttgtttaaggggtcaaccccttaacactggttttggagcactggtttcggagtcttgcacatctgcttcccctttcagcttgtgagctcggttactcctgaaaataaatgtaatgtgtattcagggtttagtgtaatccttatttgcattaatgcatttgtgcttcatgtcattgtactgaatgaagttctagtcttcttagggctttcgttgtgtacaaagggacaatgcttagattaatcttaattgctaccaattttcatcttatctatggtacaagattaatgaaaagtgataaaagaaggaactgacaggacaggtagtttatgactctaaaatcagatagtctacaaacagacaaggtgtcattttgggtaccataaaggggatgtccaataactagaacatagaagtggcattttgttgttttgtttgcagtatctacagtcaaacacctaagacacacatctggtttggggtggaccagttgcagtttaacgttaaaacccagccctgctggtggatgtagaatgctggtctgaatgtgtcagagtgattggttaagaactgtgcctcctgcaggaagatgactcagggtcacccagaccttggtttatctgccaaagaagggccaccaggatgccttttctggggaggttccatatgttgcgcctaaatgtctcagtgattggattttagtggcatgttctcttctgacaacaagctttgcttctgccatgttgaaatgcaaccttaatagctgtgtacctcttcatgtggctgagtctgagaggcagcaaaagatctacctttctccataatttttgtttagtaaggactttttatcactttaatgcaagttaagctttgttttgaatataagacttatgataactaggtcagttacatttttgttttcattatgttttttaagttaataaacttgattttttaagagcagttttaggtttgcagcaaaattgagtgggaagtacaaaggctcatccccacaattcctcgctattaacatcccccactacatcagtacaattgttaccactgatgaactacattgacacgtcaatatcacccgaagtccatgtttacattagggtgcacttggcgtacattctgtgggttctgacaaatgtatcatgacatgtatccaccattgcagtatcatacagaatcttctccctgccctaaaactcctctctgctctgcctacttcattatgttgtaaaaaaaatgacttctcaccaaataacaaatgccagtcaccaaaaatcccagccttttatttaagcagagggttgattggtacctctctccatctcctgatgggataattttgcctgtagatgggaatttggaatggagaatctctttcaaataagagatcacatgatctgtgttctagagtctataaaataaccaattgaaaaggaagtgtccaacttgacttatattttctggatcaatttgactttctgggaatttggggtttacttttgcttttggcaatttctttagatttgtctcttccatccatctttctttgagaagcttgatgcagacctgccaattgttacagtgtagcagtttcagggaagagagtaaggaagtgattctaaggacaggaggagctttctacagatgtgtcctgcctccatttgctatgagagggctctctcttttttttttttttttttttgagacaaagtctctctctgtcgcccaggctggagtgccactgtagtggcatgatctcggctcactgcaacctctgccccgccgccaggttcaagtgattctcctgcctcagtctcccgagtagctgagattacaggcatgcaccaccatgcctggctaatttttgtatttttagtagagacggggtttcaccatgctggccaggctcgtctcgaactcctgacctcaggtgatctgcccgccttggcctcccaaagtgctgggattacaggcgtgaaccaccgtgcccagccaagcaggctctcttttaaagggcttcctgacctcaggccagctaggcacctccaccttcctgcaaacctcttcttacactccagctttttgctagagcccagagctcccagttggcccttccacatcctataactctatggctgcaaacctgggcacttaatacttgttagaacttgttacttcaggtcttggataatagaggctggggtgacaatggttgtggcttgagactcaggtgataggaaaagctgtacctgtccctgagtttgtgttcttaatctcatgattcgttaacagatggtgttcaatgtctaaagccacctttgcattataaatgggagaattttgctggaaagactctctctggcatgaggactctccacctagccctcatcttttgttcattttgtcaaacaaatctacatgtgttaaaattgcaaagaactaaatacacacaccacactcacagatgagtgcatgtgaaactggtgaagtctgggtaaagctggagggatgtatcaacgttagtttcctggctgtgatgccaaactatctatcattattcaggatattactattgggagaaactgggtgatgagtagacaagattcctcagttatttcttacaactgagtgtgaatctacaattatctcaagacaaaaagcttaaaaaaactcagcttttacttctttgttttatattgccatttccaccatactccttacagtttggtgttctgtggattctttactaatctgcctcgtttatttaaatgttaattggcgtctgttaatttgatttcagtactagaagccaaactcaacaataagaccccttaatgattacaaggtattagagcttggacaagggggtctgaaaagaccctcatccctacaagaaagtaaccagtgttcagaaataaataggcatgagagagatagaaggagagagagaaagagagaataccctaacagaaagaatgactgattggcaaatttaagagctcacaaaacagaccaggtctaggatgttagaaagtacaaacagaaaatagcccatgattttaaacattaattctttagtttctttttcccttttaaattttgaaataattatagattgataagaagttgcaaagatagtatggagaggtctttggttttccccattgcttgcatcttcgataactgtagtgctgcataatagcaaaagcaggaaaccaacatcactacaatgtacctggccacttctgtgtcatttgatcacgtctgtagattccgtaaccactgcctttattatgacacagaagtgctcttcaccacaagatctccctcatctacccatttccagttatatcccctccgtgccccaaccatccctagcccttggtgcctacccatctgtttaattttctcaatttgggaatgttgtataaatggaaccatatggtatatgacctttggcattggctttttctttttcttttttttttttaaattatagtttaagttatagggtacatgtgcagaatgtgcagttttgttacataggtatacacacgccatggtggtttgctgcacccatcaactcgtcacctgcatgagatatttctcctaatgctatccctcccctagcctcgcaatcccggacaggccccagtgtgtgatgttcccctccctgtgtccatgtgttctcattgttcagctcccacttatgagtgagaacatgcggtgtttggttttctgttcttctgttagtttgctgagaatgatggttttcagcttcatccatgtccctgcaaaggacatgatcatccatgtccctgcaaaggacatgaaattatccttttttatggctgcatagtattccatggtgtatatgtgccacattttctttatccagtctatcattgatgggcatttgggttggttccaagtctttgctattgtgaatagtgctgcaataaacatatgtgtgcatgtctctttatagtagaatgatttataatcctttgggtgtatatccagtagtgggattgctgggtcaaatgggatttctagttctagatccttgaggaatcgccacactgtcttccacaatgattgaactaatttacactcccaccaacagtgtaaaagcattcctatttctccacatgctctctaacgtgtgttgtttcctgactttttaatgattgccattctaactggcgtgagatggtatctcattgtggttttgatttgcatttctctgatgaccagtgatgatgagctttttttcatatgtttgtcagctgcataaatgtcttctttcgagaagtgtctgttcatatccttcacccactttttcatggggttgtttttttttcttgtaattttgtttaagttctttgtagattctgcctattagccctttgtcagatggatagattgcaaaaattttctcccattctgtaggttgcctgttcactctgatgatagtttcttttgctgtgcagaagctctttagtttaattagatcccatttgtcaattttggcttttgttgccattgcttttggtattttagacatgaagtctttgcccatgcttatgtcctgaatggtattgcctaggttttcttctaggatttttatggttttaggtcttaagtttaaatttttaatccatcttgagttaatttttgtataaggtataaggaaggagtccagtttcagttttctgcatatgtctagctagccagttttcccaacaccatttattaaataagaaatgttttttttttttttttttgagatggagttttgctctgtcacctagtcacccaggctggagtgcagtggtgtgatcttggcacactgcaatctccgcctcccgggttcaagcgattctcctgcctcagcctcccaagtagctgggattacaggcgcccaccaccatgcccagctcaattttgtatttgtggtagagacgggatttcaccatgttggttaggctggtcttgaactcctgacctcaagcagtccaccttcctaggcctcccaaactgctgggattacaggcgtgagccaccgcacccagccttggcattggctttttaaaattcagcataatgcccttgagcgccatctatgttttgcatgtattaagaattcattcctttatatttctgagtagcacctcatggcatagatgtaccacaattcatttcactattctcctattgtaggacttttttttttttccagaatttggctgttatagccaaaatttctgtgaacaatggcatacaggtttttgggtgaacgtaagtttatttttctaatataagggctcagaagtgcaattgttagatcgtatggtaagggtatgttttattttttattttttaagaaaatgtcaaagttttccagagtggctgtaccatcctacatttgtaccagcaatgcatgagagatcaggttgtttgcatcctcagcagcatttagtatcgtcattttgaacagaattttaactgttttaatcagtatgtagtgttatgttcctgaacatattttcatgtgtttatttgctattcatatctcttttttggtgaaatatctggccatgtcttttgcctgttttctaattatattatttattgagttgagttttgaggggttttgttttgttgttgagacaaggtctcactttgtcgcccaggctgcagtgcagtggtgctgtcatagctcattgcagccttcaactcctggcctcaagtgatcctcccacttcagcctcctaagtgagcagatgagactacaggtgtgagctaccatgcctggcctgagagttctttctacatattagatatgagtctttggtcagatacatggtttgcaaacattttcccctagtctgtagcttgtctttttatcttcttagcagggttttctgcagagcaaaaaatttaattttgacaaaatccaatttattaatttttccttttgtgaattttacttccggtatcatatttaagaaccatttgcccaggacctaggttcctatgatttttttcctatattatcttctaaaagtttcatagttttatgctttatatttacatttgtaatccatgttttgtgtaagatatgagatttaggtcaaggttctctttttgttgttgttgttgtttgtttatagatatccagttgttctagctccatttgctgcaaaaaactctccttccttcatggaattgcttttgcatccttgtcaaaaatcaattggccttacctgtgtggggggctacttctgagttgtccattctgttccattgatctatctattttttttcttttacgagatggagtctcactctgtcacctaggttggagctcactgtagcctggaattcctgggctccagctatcctcctgcttcagtctggtctacatatcttgatatttgagaataagaaagaaggacttcaagatccgggttagactccccatgtcccagtacctctggcctccaccaagaatggatgtgagcactggaactgggctcaccaccccagtggggtttgctctgcacaggagcacgtgtgaaggactttacccactgctttctctaccacattccccagacactactgttttgggtctcttttcatttcttttccttgcttacacatgttctcagattaaagtgggattttctgaaacagattttttctataatggggtaaaaaccgtaagtaaacagaattatcataaccatttaaatagtaataaaatatgtttttctatttctattcaaagagggggaaaggtaactggagaagatgaaaggaaaagctagatttgtgggtggtaggtgtgttttcttcttcttcaacaacaggtacagagttttagtaaaggacttcaagggaaaaggaaaaaaatagcatatactgttatggggttatttttatctttcatttttgtgacaacttatttgtacttaagagaatctttccaaagagttagaagcatcattaaataaagactgtgaaatgtgcaatatggcttatttatttaaatgttaattggtccaacgaacacttctaattagctctatatttgcttagcaaaaagttttacaaattccaattgtgaaaagcagctattttgagctggtaagcatgttgcagcctcagctatgatttttctatagttctcagcccttgaaggcacaatttaatttttcatgtatgcatactagcaacggtaaacacttgcgagtgtaaagaaccttctttaattagctgcacaacaattaaaggattcacaaactaaattgaaccctgtctcggtgcttactagctgaattctaccacctgtcacaacagcactttgttcaatctgttatgcaaaatcattatagcaatatagtggaggggaaaaaaaaagagaaaacagcaattatttcttacttttctcttgaatgggttattttgggttatactgatgtcaggttcattgaagctaaccttttgaaatctgtaacagcataatacttctaaggcagtctcagaatggctggaagaatattccattttacgcttttaggaggaagcagcattcatttctttcctcctaaaagtgctggagactctgatcatttgaaacaacctgttctacctctcccagccaccttccatttgccttttttcaccgggaaccctgtacggctcgacaggcttctgtgttttaaaagcttgcaaaccgcggccgacgtgggtttaaagatgcaattctcaaactgccgcctccagagcatctcgagtcatattacttcataagcccagtgacttactgtaaaaacatgtgtgttgcttgctttttaaacattttttaaaattaaaaaatatatatatatatatatatatatataattttcaaaaatttgatttaaactaaactgctctcctgtttagactgggtcggaggggaatgttacccccaccccaccctggccatttgcagagacaaaggctttattgtgaggcccaaacccaaagcctgacatgacagacttctccctggagtcaaggaataaatgtttacatttggtgttgccgtgccctggccccctggtaggaatgcctgcaactctgggctttcacatacagaagggatggggagggatgctttgcggaggagaacaccgctgctgacgagctgcactttgagatgctgcctggcattgcttaaaatggcatcaataacatattgttagtcccagcctccaaagcatatgtgatctggccatttcagacgtcggagtgactgtagacaaaccgctgagctcagtcagagggtctgcattctcccacattacaatattttttataagttgttctttacatcatttcaggaaaatgcacaacgcagacaaggcaggcctttgaaaatctaaactctttccctgaaaaaatgctgaaaggaggaaagtgagagccaaaggtcaaaggctgcgcaagaatgtgtttctctatttttcctatttcttaagcagaggaaactgtcatcgttgtggcatttgggtaagaaggactatctccaatcaggtccaggagggagaatttgaagtctacaggggcttctctcttctttctgctgaaatccaactctttggctggtccagggctagtgcatggaaactaaagtgagctgctatccgctttattgaagttggtgaaatgcatacctcctgcaaacttgcagctctagaaagaagacccacttgctgtcttccacagcctccctgtctgctgctgcactcggctgcagttttattgccagagtctccaagtgcaaggtccagctgctctttgtccctgggcatgctgtccccctcgttcttcctgtgctcttgacaacggtgtctgcaccaggcttttgatgggaggctgctgttgccttcagggatgggatggtcacatagtaggctctcagtgaacatctggtgatgaccgtaaatgtaatctccacttggccgaagaactcatgggaattgaagggtggattcaggcaatttaagcccttcagcattcccctctacatttttttctttcctttcctttcctcttttttttttttttttttttctgctgttcatttagaatctcctcatcacggtgcactatttgttccatcccacgtttcttattgctagtcttgcaagggaagatggtaggtagaagaactgtagcgtaaggccagcgttgcccacgcagggcctgcctaccttgtgctcagacctgggttgggcacaaagggggccatcctgccttcaagaggcttctagtctgggcgcagagcccagactccccaaggaaatgtggagacagccttggtgtagattctgtatttggggcaggccagagggggacactgttttctggcaccccagcatccctggaactccagcatcctcaactgcaggccacttgaggtagtgatggcttagcagtgaggcgcatggcatgtggagacaggcagtctggggttcagtcccagcaatctagtgatcagatgtgaaactttaggcaagttatttaacctctctgtgcctcagtttcctcaaccataaaacgaatatgatagtagtaaaactcactgatagagtttgagaattatgtgaaggcacttagaacaggactgagtgcccaggaagtaccacgttagttaccattgctgtttgtttctagaaaactctccaaccatgattttcctcttctcttatactacaaccacagtcatcaacacagaagaagacttctgtgaccaaatgtccggaggcgggggggctcctcaacacacccagcagtggacaccagctgggtgtccccaattcaattctgccaccatctacccagagatcccacaggttgcgagctcagtccccaagacggtcctgccccaggcaccagttgcaagtccaggcctcacgaacttctgaccaacaggcttcacgttggggttcccatgaccccctctttgggtcctattaatttgccggagcagctcatggaaacatttacttatgtttaccagtttattatcaacaatattacaaaggatgtgggtgaagagaggcgtaggggaatgtatggggcatggtggggagcttccacgccttccctgggcaccactgtccgggaacctcaaggcattcagctatcccgaagctcccagaacccagtcctcttgggtttttagggaagcttcatgatgtcatacatatccttcagaatatagggtgagaccctctttggggagggtcttaagaccccaagtcagaaagatgggggaagattagagtcctgccttggggcaggtgaaaggaggtcagaaaaagatcagaaatattctgtttcctgaggcctaatactgccaacattacaacaaaagactctgacagggaccatgggagttatgagccaggaactgcagacaaaacctatgtatatataataacaccgcactgctacttcctgaacttggggtctccctgtgcctgaactccataggttctgagattcaacagaaccttaggaaaccatctcctagctcctggcttcaggcttgatgggtctgatgagccatcagaccagagtcttccagggaaagcttctccatgggtaccaaaccatttaagactgcacttctcccttgcctcttgatactgtttatgggcgcagtgttgtagtctagaaggtggattttcagaaccggtgtgatcagtcgccacacccgaatcgttttccacctttgcatcctgcctactggaaattggattacttactgaagaatgtggaggcccttgatgcagaggcactgttaacatttttttttttttttgagatagagtctcactctgtatcccaggttggagtgcactggcacaatctccactcactgcaacctccacctcctgggttcaagcgattctcctgcctcagcctcccgagtagctgggattacaggcacccgccaacacacccagataatttttgtatttttcgtagagacgggatttaccatgttgtccaagctggtcttaaactcctgacctcaggagatccacccaccttggcctcccaaagtggtgggattacaggcgtgagccaccacgcccagccactgtttctatcttatcagacctgaaggatctctaaagtcaggagttcctgagtatcttccatgctagaagtatgtgcattgttccatgtgcagggcacatgggagagacacaatcattgttaacatatgaatttatagcctagcaggggcaccaagaaaagggaacaactagtcaaccgcgatgcatgcccagggagaaacaacccaaggaagaggagtgggagacgagagagcggagtgtggttaaggactaggaaaggatcaggagcaggtgccaccgagcaagaatcttaatttgccatggtcatgggttggggaaggttctgaaggtgttttctttgaaatccacaccgctttactccaggccaacagggattttggccaggagactgcaggctgatgtaggagagctctgctgttggggaaggatacattgtagggctataaatacctgagataggaaatgcgtatttttagctccaagcattgaggaaacttggattatctagcagtgattggggtcatctcccagctctgtttctacactgggaaactgtacggccagttttccttttaagggttgagcaacgtgccggggctggcacagcttggtgcctgacacagagtgacccctggagactgtctgtggaatgactgtgtgacagcctccagtgaacaagttttctgtagcgggtgtgctcctttaaagcaggggccaccacaacttgttggcatttccctgggtgttgctatcatgtcagtttctcatggtgataaccttttaaaagatgtttgatccctaaacagtgtagaaagagatgcgagcagaggagatccacagagtagacagagggcatccccaacctctgttgtctctgctttggaccctggactgactgcaatcatgtcgggtcccaccagttactttaatgaggggggattttgcttttgcagaagttgctgcctttcttgtgcctgttactttgctcacttattactggggtcacagcaggtggctggataaaggatcaccggaaccagggagccagccctacaactccactttgctcctccctgacctaccctgtcctgtgtggccaacagactgaccttatgatccccagaaggctgaaaaatctacaaaggatgtttcttcctttttgtttatattgacgttttgctagtttttctaaacattacataatgagctgatttcaaaatcagcttgctgtttcgagaaaactctccaaccatgattttcctcttctctcacactacaactatagtcatcaacatagaagaagacttctgtgaccaaatgtcagggtggggggctccccacacacccagcagtggacaccagctgggtgtcccccaattcaattctgccaccatctacccggagatcccacagggtgagagctcagtccccaagatggtcccgccccagacgacagtcacaagccggggcctcacgaacttctgaccaacaggcttcactttggggtttccaaaatcccctgtttgtgttctgagcagcaggaagggaatggacatccctgggtgatcaccaagatgagttctttgctgtctctcctttcaggcccttatgcatatatattctctctttttgttgttgtacataaagtggattatgcttgcataccattttgtgaacagccactgaatttaatgtattcttctgcacccttcttgatgagtgcaaaaacaattgcatgactctaccatgattgatttatttaatccagtcccgtgggtggaaatacagatggtttccaattttctttttctctcattagatctggggactgggctccttgtctttggctcacagaggatgactggggtttcctttgttgagaggaaagtggccgtcatgaaatcagttgggttttctctgatgtgatgggcactatgagtacctgccttggcccactcatcaccaaccctgaaggggtctcaggcatatacttttggattggaggtgggttatgagaaagatgggctgtgtttctttttgtgtgagtggatgcatgtacctgtgcacgagtacatgtgtgcacagaggtgtagaggaagttcaacctgttttttgctttgggtttgtggtgattgaatccaggccattatagaccatggggagaagggtggaaatctgggtgttgcattctagtaaaattggccactagtataattgccctaaccttctgagtgtctgctcacgggtgttaagcatttgtctgtaccatttttgattagtgcatggtatccaggggatgcccttgtgagccagcctcccctccccatcaccacctttgttccttgagcttctttccttcagtactccatctgcattatttgtccaggccacagccttttctccaggaattagaaagtcatcactgttttctactgccattcaatcttcttgacctctggtgagagttgtgagctgctctctctgccaatttcagcagctgggagggatattggtgagggcacaggaagtaagtggaagaagggtatcaaggtggtcacatcgcagttgcaatctgcttttgttttattcctttggttgttagtaattagttattcatccatccatatgtccatccatccatcagccatcattgatccatcggtccatctgtccatcatccatccatctatccttccatctattcatacatctatccttccatctattcatccatccattattctctatcatccatccatctatatattcatccatcctccatccatcgatcttctatccatccttcatctatcatcatccatctattcatctgtctattcatccattcatccatccactcatccattcatccatctatccacccacaaatccatcattcattcattcattcattatcatccattggtccatccatccatccatccatccatccatccactcattcatccatccatccactcatccatccatccatccatccacccacaaatccatcattaatccattatcatccattcgtctattcatccatccattgatccattcatccatctatccatatctttctatctaaacattcatctctggtatgtagaatggtgtctggcatagagtagttgctcaataaatatttgttgaataaatgaatgaataaataaataaaagtcagaggttttgaacttggagagtgtatttcctgccaatagtctgcagcaggcctatgagattcagaccaccttgttctgctaaaggacatctcaagcctcgctaatcttacagagctctcttttcttatgttgttatccttgggaggcgccctgtctaattttctccttccgaatccctggcccccctgctcccagcttccttggcagcagacaaggaagaagggcaatctaggtgtacttttataaatgacactttgatgaacatcatttcagctaaatctttgtacacgttcttaattatttccttaggtttaattgctagaagtggaattgccaggttaaagagaatgcacatttaaagatttgaatacctgttgccaaattgcccttcaggcatgttatgtcaaattacgtcccccgaccaccacaactgccatacaaattatgaccctgtccctttccttatattccttcaagtctgaatgttatttaacaaagtggtacaccgtactaattttatatgcaaactgtctcattttgctttttatttctcaagcttaatatgtatgtatatctatattttatgtagatatctctctatatagatgtaaagatacatatctttaatggaatgcctctaagtccctttggtgaattacctgtttatgccttctgtctggtttccttttgggtatttgaatttttttttttaactgtagcatctcttcatacatcagagatattaaccctttgtcttatacacatcttctaattgtttcttcgaagtatttcacttggaaaaatagttcgtacatggtgttttctaatgagataaagggatttaagtgattaaatcttttaatgtattcctttactttttagtgccatgctttgaaaatgatttcctaccccattaataatactcctaaattcaccttaagtatttatgattttattttaaatataaatttctaatccattaagtgcttattttgatgtatatccttagggtaaaattttgtattcacacattgcacacatattcataattttctattaaagagattttaaaattacattttccaactgatatataagatatataggaaaactccatttactttttgttctttgaaatttataaataaaataactttaaaaaattatttgaaataaataaacaatgaaaagtgaaggtctttttttttttttttttttttttttttgagacggagtctcgctctgtcgcccaggctggagtgcagtggcgcgatctcggctcactgcaagctccgcctcccgggttcacgccattctcctgcctcagcctcccgcgtagctgggactacaggcgcccgccaccacgcccggctaatttttttttgtgttttttagtagagacggggtttcaccgtgttagccaggatggtctcgatctcctgacctcgtgatccgcccgcctcggcctcccaaagtgctgggattacaggcgtgagccaccgcgcccggccaagtgaaggtctttttaaaatctctcaccttcacctcaatttcaccctcttctcaagaggtaataatttttcatggattggcattatctctgcacatgcacaaatgcatataaatacaaaggagttcttgtttttcacaaacatggcaaaaccgtatacacattgctttgacactagcatttatatacttaagaatatagagatctatttaattctcttaaacttggacaaaattccatgatatggatgtaccataactacttaggtattttccaatgggtcaatgattgaatcatttccattctttctccaattaaaaaaatgctgcaaaaaaatttctggcacatacacatgtgaatatttctataatatggatacctccaagtggcattgttaggttgaacggtatgcacatttaaaattttcgtggatattgaagaattgctttctaaacagggtgcaccagtttacttttctgcagatagtgtgtgagaatggtcagtttcccaaacctgtaccaacaatatatacaaataaagctttttagtttttttttgcaatctgatgcaccaaaattttaaaatttttatatgaatttcctttggaatatagttaaagatacatttttatttatacaactttatatggcttcattttaaaaagtctttaccaaggattataaaaaaattctcctatgatttcagtgatgacttcttagttttaaaactttttgtgtgaagtaatgttgtgtaatgtattttttaaatgcatagactattatctcaatatgtttactgatcagtctatttttatatctgaatcatcacctttatcaaaaccacgtgtcactttcgggcttctctctacctggttcattgacatatttgtctacttctgtatactaccacattatttcaattattatagttttactgtattttgatttgatagtacacatgctgtctttttattctttcttaaaacttgcttggcaattatcacattttttaatgatgaattttagatttcacttgataagtttgatagatgatcttattgataatttgacttggatttatagattaattttaaaaaaatttatgtatttatgatatcaccatttcatccatgaacatggtatagttctattcaggtcttattttatgcccttttgtaaagttttctgttttacttttatagattttgcccatgtcttattatatttattctgggtgtttgaaatttcctctgacaacttacaattgtttttttttatacaggaaagtgatcattttcagtatattgattttatctttgacattttactacgatttattagtactaacagtttcatactttattctttggatcttttaggtacagtcattttcaactgtgaataatgacagttttgcctagtccttgtaaataattacaactcataacttctttttttttccaaaaatttcacattgtttgtattgactaagacttccaggacagagtgtcttgttgctagctttaacagaaataattccaatgttttgccattaaacataatgtgtgatttggccatttatctttttataaatcaggaaggaatgttgaattttatcaagtgatcttgggatgttgttgatataatatgattattctcttgtaagatattaatatagtgaattagtagactttctattgttgaatgaatcttgaattattgggggtaaactctagttgttctttaataaattatgtgaatataccatatggttcatttcactaatattttatttgatatttatattgctgtttataaatgagattgccttatagcttctaatagaaagtagtagtaatagtagtaacagtaattcttgtccttccttttccccttctccttcttctcctctttctcctccctcccttctttctttttgtcttatatgctatatctagtagcactatcctagtctcagagaatgaaatgagaaactttctatcttttctgtgttccgagatggtttatatacagagacgatctgtttctttgaacttctggtaaactatgaacataaaagtgatgaggcttttttttaaaatgtaaatgttcgttatccttaaatttcttctatagttattcttttattcaagtatgttacttctcattgtcatatctgataatttttttagacaattcatttattttagtgtagattttcaaatttaatggtataaagttgttctgtattttatcattattttaaaatgtgttttgtatctgaatttttattcccttcctcaatcccatgttgtttgtgttttctctttttattctcatccatattgccacatttattttcttggtcttttcaaagaaactgtttttagttgtattgaatgagccttttgggggaaagggtgtggagcggttctatttaattagtgtctgctcttatttttatgaatcccttcttactttcatcaggtgtatttttattacccccctccctagtttatggaattgaaggctttgttcatttgttttcaattcttttcactttctattcattacattaaaggttataaagtctcatttgactaccctcttaaccacatcctagaatttttattcgtttgttttgctattgctttgtttttacttttaatttgaacaggtatttaataagatttataggttttggaactttattcaggtatttttgaatgctgtaatacatgtaacatttttgagatgttgcatggatgtttgtaaagaattcatattttctgttgggtatggggttctgtcattcttatttttaaacatttatttttaaagtctaatttcctatctgaggaaggcatgataaccttttccatgatgaatttgttagttttgcattacattacccgcttttgcattatgtattttatagctttgttgctaggtgcatagaagttcatcactatgattgctccttgaagttctttgatagactgtattctttcttgacataaaaattccctgtactggctgggcacggtggttcacgcctgtaatctcagcattttgggaggccgaggtgggcaaatcatgaggtcaggagttcgagaccagcctggctaacatggtgaaaccccctgtctctactaaaaatacaaaaaattagctaggcgtggcggcgggtgcctataatcccagctactcaggaggctgaggcaggagaatcacttgaatctgggaggtggaggttgcagtgagccgagatcatgccactgcactccaaccccgggcaacagtgagagactctgtctcaaaaaaaaaaaaaaaaaaaaagtttccctgtacctatttaatgttttggcctcaaattatattttatatgatactactatttcactacttacttttgttttattgatgttgctttgtatatatcttttccattcttaaattttcaacctttatgtgaaactggttctcacataaagaatataaaactggggaatggtgggcatatatttaacctaatccaatatttgaaattctttcttttttatacatgattttaacccattaacatttattaagtttactaatatgtttagtttttatttttgctatcgtttttatgttgtctgttaatcatggcatatgaagttttctctcttttattgcatggatgaaattttgtttcattttttttcttttctgatttaaaagtgtacacctggggtttggtcacataatgagaatgcttaatttctgacacattttaaatgtgtgtgtgtgtgcacatatgcattcagcatccatatcctcccttgaacaagacaaagccttatctgtcatccatcccagccccatgtcctttgcctttccttcatgtgaaaatgatctgtgattttaattccagacattgtaaaaaccattatgtactacccattatttgaacttaaatataaatataaactgacctttggtttacttattttatttcctctgttgtataaaacctttaatgatttcagagtgagtctgagtccttttttatctgaaaatgtgttattttatcttgcacttgatgctacatatagaattctaggtttaaaataacttcccccagccctttgaaaatattacctgactattttgaaatatccagtgttgtcattgagaagtctgatgacagtccaattctcattcctatgtgggtaagctgttgtcttcttcctcttctttttcttcttcttttcctcctcctcctccttcttcttcctgcttctgcttcccctcctcctcctgctctcttcctccttctccttcttcctccttctccttcttctcctcctcctccttttccttcttctcctccccctccccctgccccctgtctccctctccctccccctcctcctcttctccctccccctccccctcctcctcttctccctccccctcctcctcttctccctcccccttctcctcctcctgctcctcctcctccttcttcttcttcttcttcttctccttctccttcttcttcttcttcctcttcttcttcttcgtcctcttcctcttccttttccttcttccttcttctccttcttcttctcctccttctcttttttttccttctagcattgttttttccactttctttctggaggttggaggtctcttcttgatgtgacagtgtgtgaattcttttttccagaaattttcccatcagctgggggattctttcaaacgtaattctttttatttttctcagtctacagactgaaaaatcatcatgatcatcatcatcgtcatcgtcatcatcatcatcatcatctttttatttgtgggggacagagtcttgctctgtagcccgggctggagtgcagtggcatgatctcggctcactgcaagctcagcctcctgggttcacaccattctcctgcctcagcctcccaagtagctgggactacaggtgcccaccaccgtgcccggctaattttttgtatttttagtagagacagggtttcaccgtgttagccaggttggtctcgatctcctgacctcgtgatctgcctaccttggcctcccaaagtgctgggattataggcatgagccatcatgcccggcccatcatcatcatttttcaatccttagctcgcttgttctttctggaacttctacttgatgggtattagacactttggattgtatctgcatgtcttttcatttatctcctatactttccatttcattatttttgtactactttcacatgatctttcatgtcaggaatttggctgggaccatgtctattcagcttttagatcttcaacagggatttaaagaaaatatatgcaatcaaattgtgaatttccaacacttttttgtcttttccttctctgatggctctatttccaatcagtcctttctctctttatggttgcaatattatcctttttgtgaagatactagttagaattttttattaaattatctttgtcctctgaatttttttttttttttttttttggtacatcttggttcttctttgttgtgtttttagcttccttcacatttgtagtgagctattttgtcatttgtttttgtgaaaagaggagtagtggcttagtattggtgcctggcagatattcttctgtggttctctaggtctgttaccccatcaggctctccatggcatgggagggatgctcattggctcttactgtggagggttctgggactgtcagactcacgttaggatgtgcagtgtggggtgtgtgggcaggaaaataggcaggctgggactcacccacctcctccctgccctccccatcctccctgggaagagggcaggctttctctctggcactgggagactcaggtgctcaccttcctagtgggtggccctttcatctttttccccaccacgttgatgaggcaactttaaactctctcctgtgtctttccaggtccctgtcctcactctagaacatttttttggttaggtgattcatattcttagagtgttggataatacttggcacttggctttgaggatgatgcttccctctaccactgcactttccattttgagtttttgtggatcagctcattattttcaagttctttccccacagtgtatttgaggctgttctttggcctatgtctattgatctgatcccatctatattatttctttctttctttcttgagatggagtcttgctctgtcatccagactggagtgcagtgacacaatcttggctcactgcagcttctacctcctgggttcaaacaattctcctgccccagcctcctgaatagctgggattacaggtgcatgccaccacgccaggctaatttttgtattttttttttttttttttttttttttttagtagaaacagggtttcactatgttggccaggctggtcttgaactcctgacttcaggtgatccgcctgccttggcctcccaaagtgctgggattataagcatgagccactgtgcccggccctgatttcatttactttccatcctcaggaatatctcaacattcctggcatgccgatgacctgcttcttgtttatttagtgccattagggaattattctatgtgaaaaaaacatcttttatgccatttccagggatttgaggtggcagagaaggagggtgaatgtgtccagttttccatcttgatacaatccactgcaaatgttatttaaatttcgactttctgggttttaagatttaatggaattctctaaatacaaacataccattagaaaaaaaaggataaagttttcttatttccaatatttatagttcttatttaattttctttgctaattgcattagttagaacttccataacaatatttaagaattggggtgatggggcatctttgcatctttagtttgcttttaatttgatgaaaacgtctctagtgttttatcacaaggacatgttttgggggtcggaatttttgtttgtttttagacagggtcttgctctattgcccaggttggattgtagtggcacaatcattgctcactgcagccttgaactcctggaattaagtgatcctcccacctcagcctcccaaataggtgacatgtcactatgcccagcaatttttttttctattagtagagacaagctcttgctatgttgcctaggctcgtcttgaactcctgggctcaagcaatcctccccgcttggccttccttagtgttgggagtacaagtgtgagccaccatgcctggcttgggttgttttgatataagtatattttcatgatcttatttttgtattgccaagcattttttttttttaatcagaaacgaatacccaattttgctggaggatttttgatgtctatcaaaatgatcatgtagatttgttccctggcctattatgcttgatttttaaatcttgcatcatcatttttgacattgatggagcattcctggtgtcctgttctaaaatgaaggagacatctgtgacctactcactgtatagtttcttctcttctctggagaaggcagcctttcacaggtgaagtgcgttcagtcattcccaccgtgggtgcagcatggatgacaggaaattaacttaatgctctttgttttgttaaatctaaatgatagatgcttagtaattgttggttgaatttaacagaaatatttagacttctagggttttttgtaaaatttcaaatatctgaggagaaaaaaataaacttgtgcatccttcctcataagatgttaaatagcatctttactcacttcaattacatttttggaacacctacatgtgtactgggcattctgcctagggatctgcaaagatgggacagaggtggctcctctgaaggtggggttggccggggttggaagggtgtctatgatgatgtgcccgtctcaagaggtacccatttccttcatgccaccatcactaaaccttcacctctgggagtcattttcttccaaattatgcaattaagatacttgaattgttataatggttattattattttaaactcttatttacataattctggtgcagactagatatatggccagttaccaaaaattttcttttaaaaattaagtattaaagattggtctctgctaaatgaggatggattttcttttattttaattttcccttcagaaataactttatattttctgattagagaaacgatgcgtgtccatgaactaatttggaaaatacacaatagcattcagaagagtgttggtcctgccacccagaaataacattttgttattttttctttctttattttctatgcctatatattcttttctttttcagaattggtaccaaactgtagccatagctgtatctttcacttgaaatgttatcatgggcatgttcccatccactgaaacgtcttttgaaagcctgagttttaaggcagaacgctccttcatggctttgatgtaaccattcccttactcttgaacatttggggtgtctgagtgtttttctcactataaatagcatttccgtacagttttgtctttattgctgatagcattctaggtttgttctaggagtggaaaactgagtcatagtttataaatgtttttgagccttttgatctataatgccaaactgctttcagaaaaaatataccagttttcactccttccagtacttcctaagaatgccctttctctgtaaccagaagcatatgtcatcattacaaacacacacacatatgcgtgtgtatattcacgtgtgtgtatgtgtgcatggctaattttacaaacgataaatgttgcttcgctattttaaatcagattctacccaagacagataaaataaaggaaacgtgagttttgtataagatgagagctgaatgtgcaaatgggccagcagtgtgaggagcaggaggattggatggggtctgagaagaggcagcacgctccgtctcctgatgtgctcacatctggggaggctttggcgtgaggcttctctcaccatggctctccccatccaggcaggactcccaacacgtcctctgctccacggcatcctttccaggcacggagaagccatcagcaacccgggaagctcagtgaagaggaaaggcagcaaagcaggaggggacagagttcccatccgggtgctgcttctggaggctggaggagaggccagattgtggtggccggtcctgggatgagtcatgacccagtgcttgcaggagtcacaggcaggctgggcgctgggcagaaagggtgcagggcatctgcagggacccagcctgcatgtgacactcccagggatgtcacggggaactgcttgtgcgtggctgagaacagaatctggcttaactcttttaacaagttaatgtttgtgctcatgggccctgtgcacatttaagaattaattaaatcctttaaggaagccatttatgtttgagaccaaagaagatacttaggggccaaaatacccccaaagaagaaggcctgatcacatctcttatgtcttggaagaccccacaagaccaacttccttataccccgatccgcagtgcggtgtgtacaaatacctttaacccattctttccggaaagctcctggggaggcatattaaacctgagttattttcaatttcatctaaggtgtctctatccaatgcagtttcttcaaagtctgcaatgtgggattcaaaatctcttagcatcatcaaagtcttagaaaaatatattactaggaagtagagctgcttcttgtgtgttaattacaacaagcccggctgccgcgcagataatctctagcgtcagaagcatcagctcaggcaatatcaggaaaaacaaaatctttttacaaaagaaaatcctaaattctctttttttttgccctctgaggaaaaaaaaagtgtggttcattgtgaagttaaatcccatctatttagttgttcttataaagatttcactgatatttgaaatattcctctcttgaaagggaaaaacaaggtaggttttcaggatccagcctcagaattatggtgctattttcggagtctttatcttcagaggaaaagctgtgaatcgtccatttgggccaggttctgagtacaactagaactttagcctgcctgagacgaatgcttggtttgcatgtgtgtgttttttggtgggtttcaccgttcaccttcacttacacgctgaggttgaagttgtgcggcagacggggctcttctttcccgtggctttgagggaagtagggatctgttaccagctgtccctctgggacatctgtgctccctgaaagtagagcaggctcctaaccaagacagggtccttgggcttcggaggcagtgaaggtcagggataggtatgtagaggatccagcgtgcagagaagggagaagtcggtagattttaaaattacttttttttctttaatgaggaggaaaactccatcggttcccatttattcagaacttcttaagaagatcctaatctactgtggccttaagatccaagttggttaaaggaagagctgagtgacagcctgtcctgaccagggagaagcaagccattggtggtgcccagggcgacttcattttttttaaattttcttttttagagacagggtctcactctgtcactcaggctggagtgcagtggcacaatcagagctcactgtagcctcccagttcctggcctcctgggtagctgggattacaggcatgccaccacgcctggtaatttttaaattttttgtagagatgagagtctcaccatgttacccaagctgttctcaaatgcctggactcaagtgatcctcccacctcagcctcccaaagtactgggatttcgggcgtgagccactgtctctggcccggcaagttcagaagatacggagacccccgtgtaaaacaacctaagtcacagggtgagagatctacccttgtcacgctccctgggatctccaggagagaagccccttccagcccccagtgtgtctttaacaccttctacctctgccagcctccctctgtacacgagagcaggccccaggccagggccggctgcaggcagcagtattcagccagaatttaataacattgttctctttttatttatttttataattacctttaatttagagcaagtgatacaaatttccatttagggtaatgatatagtttccttttaaatgcattaaagtaaaaaatagtgaattaattaaaaaaatattagcaggggtacaaaaacatgggaaaaaatgtgaaggtagtttattgcagtacaactctatagcaaaaagcatcaggaaggtgatatgcgggtgcctgaaactgggagcacagatctgtaaggcccttttagactatttttattttatttattttctgaaacacgtgaggtgacccttagctactggagagtttaggattttaggaaacagggctctacagaaaacctcctgaagacaagacatattgacctaagaggtttaggatggattccaggcccaaggaagttgcatcagaaagatcccaagatagagtagcccctctcctctttagcattaatttttctagaaaggactaaagatatctccctaagtaagctaagaaccctactgcccaagaaaaaggttactagatgtcaagtaatattataatggatgctgaattttaccttttcctttctctgaattctcctgccacctccctgcaagagtatagcccatgggggtggcctactgtgttcttcctgctctcagtttgggtatcaggtcttgaccctcttcctttctagaggagacttgtccaggcttatctccacagttctcataacacctagcacatagaaggcatcatttgcccattccatctatccatccatccacacatctacccatccttctatccttctatttagcccttctctttctctctcttcctttcttcttttctctctctctccacctacccaaccatatagccatcgatccatgtatccatccaccacccacccatccctcccttcatctgcctatctacacattcatccatccatccatccaaccatccatccatccatccatccatccatccatgcgtctacccacccacccatccctcccttcatctgcctatctacacatccatccatccaactctccatccgttcaaccatccatccatccaaccaaacatccatccatccatccatccatcctcccacccacccatccctcccttcatctgctcatctacacatccatccatccatcctcccacccacccatccctcccttcatctgctcatctacacatccatccatccatgcatccatccatccatccatccatccatccaaccatccatccatccatctaaccatcttctatttagcccttctctttctctcccttactttcttcctttctcccttcctccacccgcccattcacatatccatccatccattcatccatctaccacccatctattcatctatgtatttacttcttcatccactaaataaatattttattaagaatattcagtattaaacaatagcaccaaaaatctgttgggtgcctccagcactcaggtatccaatagggatacagtaataatagaaggagacattgtcactgctgtcacagagtttatggctaatgagagacagaaatggaacaagtggctattctatgcccttaatgaatgaagaagtgaatgagtggattggtaaatcccttttctctgtcactgctgggcactgggacctgtggagtccaagaatgctggggtgaacaagcagttccatagatcagaggttgcacttgccaggccttcgccagctgggcttctggagtgagataacaggctctgcacagtctgctcaatgtgtccccagccgctgagggcctgcccagactgtgcgaagagcatgcaagggcagggctccctcccgggggcttcggcaggagcaaggctggcagtgacagcagctgtggcggggaacgggggcctgggagcggtcgctgcgaaggacgtcagggaggtgggggcaggtgggagggtggataagtagtaatatgatggggatttcagggggtcagacacaggcagtcccaggctccctgccagggtcaagcatggtgtcttgaaaaaaagacagggggcaagtttcccagggtctgggcagtgccctctgcacctacagtcccgggtgctttgctgggggcctgggctggccctgcttgctgtgagtatgcaagggcggccactctgaagctcagctgatgctggccaggggacactttgtttctgggccacaggacctggatgtagctcattttctttctctctgtaactctccacctgctctgggtgccctgtttctggttccagatacccttacacttcctgcactttccaaggcacacacacagtgggctgcaggggggtctggacttggagcaggagcactaggtgggtgcctggtcactctgggcttctgggctttataatgctcactgtgcaataaagaggaggccaggaatccctctctccagggcagggctgaccgagggagcacagggaatgaacctcaaacctgtgcaacatcaaacaccctggggctcccctgtcatggacagcagactggcttctttactgagcacaggtaacacagtctgctgagcacacagggatctgagtgtgggtaacaggggaatctctgggttctggggaggctgagagacattcctgggacagggacgtttggctgtagatcagagaagttacccaaggaggggatgaggaggggaggatggatgcaaaaaaaaataatagggtgtgcaaggctctctgctgagagggaacttattaaatccacacggccttctttccggaagactctggaacatcatgcctaacatagctaaaatcacttctccttgacacagacaaggaaagcactggggaaagacccattagtgggatttcagacccctgggcaaatggctaggaggcagctgggcagggtgagaaatgcatgcttggtgaccatggtggagtgcccattctgtccagggcacacaggagaaggtgctgcctgccaccttctgcttcccacccaacgcttctggaagagcccaagccaacgtatggctcaggatcccaggggtgtgcgtggagccttctgggcttaggatggtcaagatttaaatgagtttggtagaagaaaacaaagatggtgaggacacaaaggcataagaatgacacaatggactttggggactcaagggaaagagtaggaaaggggtgagggataaaagagtacacattgggtacagtgtacactgttctggtgatgggtgcaccaaaatctcacagttcacctctaaataacttatttatgttaccaaacgccacgtgttccccaaaaacatgttggaaaaaaaaaaacaaagatgggagtgccttagtgtgatcatgggcagggagaaggctggaagggcagaggagtaaccgagggccccagggggtgtctggaagggagggcatatttgtttatcagccaggactcctttcgtttccagtgattgaaaatttaacccaaaccaacttaaaccaccaggagacctgtattgactcatatcagtgcaaatatgtaaatggttcagcctcaggtgctgtttgatccaggggctcaaatgtcaccaagcatctgacgtctctcctccttcacctcctcagcactggccttgtccccagtgctgcataaccccactgccacccgcttagactcttcttggtagcaaaacagctgccacagctccagatcttactgagagtgtctgaaccatccttgtagctccctggcaagccctagttatcactctcgttggcctggaataggtcatatgatgatccttgaaccaattactgaggctggggcatggaacattctgaatggctcaaactgattttatagtcagaagcagggagctggctacatctcacccaagctgcaggactgagtaggaagaggggttctcccatgtagggactgtggtgggcatggatgcaaggatgtgagtgtccatgcaggcatctgtagttggctgtggagtctggacctgattaataggtgtgagcgagagtgcaggaagtcccagaccctactaggaaccctgagcatggagtgacattttcagggttcccctcccagcagagcagtggtgggtcggggctggtagcacaccccaactgggcatgactgtgggagcctccccagaggtggtctactttggcaggatctctgcaacccctgaggagctacaaacaggtaatgcttggcttccccaggcctgcattatgaaaagcttgagttacaaaatgctctggctattaaaaacctgctactgactttaacggcaataaaatatctgctgtttatgagtaattagccacttctggaaaagaactctattcctttaaatttatgaggtgccttgatttatgcatttcatggtggggggatgtcatgttacatcacatcaacctgatgtaatttgatgcaaatcaaacacatgaaggagtgcatggaaacgctctctcctgcctcctgaagtgtgtttttatatgggggaaggttttggtccttattccatctttgttcttcttgcttgctttatcaggaaagtcttaggtgaatctttaccctgaaggtccttggtcctgagtgcactggctgcagcctctgaccacccttcaggtgcttccaagggggacttcacatccccgagggtggcagagatgcaaatatctgaagctatttaatgagcacccacgccttgccctgggttgcaggagcctggggaggccaacagggagacgtgcttcctgattttaaggaccccagggttggttcctatacacaggacatgatgtaatcaatgagtctgatttcatattgtctgagaggtgagcgtggggcccggcagggggaaggtatattttggaagtctttcatagcttctgaacctctgtctgacagcttagagggtagaggtgagggcattcaataatttgttggtgggactatgtatctatttgtctgtgtgcattatttcttctttagtccacccactcatctatctatctgctcattgatccatgcatccatccatccatgtatccatccatccatccatccaacatccatctgacacctactaaatttcttgagtgaggtaacaaagaaaagtaagacacagatgcatatccactaacttgctgtggaaccataggtgagttatcccctaccatctggcctctgtttacctatctgtaaaatgggcacatcagaccaagtgtcaaggagctagatgatctcagatatttctcttgctctgccatcctctgtaccattgtccctttcctcaaggaacatctctgtgcaaggacagaaggtgtggacaactctcattcatgggatgcagagatgcttgccaagtagttgaggagaatgtggggaagagtgataggaagagagataaggtaggatgcagcagtggccctttggtggaagcttttggcatgaatctgggtagtttgccctcaggaaaaacaatgatttttgatctttgatctctgcacttaaatggagttatcccaagggtgcaggggacagcaagtggaaaaagcctggcattgggcatggagcaccacccctagtcaatgtgaacttgttggttggctgtagatgtatctcagccggttggctttcttggcaggatggctggatgggttttactagatttctcggggtcatgtagaaagcacacaccttggtcttctagcatgaggcccttttctgttccttttggtctcaggcatactagctttccagaatgcccagcatcctagcctggcttcctcaaagtgacagtcagtggtgttcaagcatcatgtgtaatgtctctgggctcctgactttagaagggaagttacagttgaaacaaggccacttgacctccttcccggttccaccttgggtgtgacatgagacgatggaggaagtttagggttctcacaaagtccaggttcaatctgtaatataattatttaaaaatggaaccttgctattgttttgatttgagtcttcttgctttctggttaggagtgacatttttgtggtcacgagccaaattttgttgcttttgtgaattccctgctcacatgccttttgtccaggtttctaatgggggtgtttgacttttccttgttaactgcaagtgctcttaaaaatacaaaaggtaaagttattaactccttgcctaccacgtatgcctctgaatgctggtcttccatgaggctttggaacaggtgactgtgagcaggactgagggtgattgcaggcctgatagaggccgcatcaacatgcagatggtgacaggggaaggaggaggagaggcaggagcagacgcaggctttgcagagcacctgccctgtgcagacgctgcttcaagtacttcctagcagtgacctcactcatcttcccaggtacattagcattgccaccgtagcacactcatagagctgacaagttgccccttgggactcagttcttttggagtaagatactgtacaccttcttgaagcagcagcgagttttcctctgttacccagagtcccagtaaagagattcctcataggagcccagagagtagcagtggccaccctgtggggaccacagtggctgctgaaggctgcttgcagcttgggtaggtgatacttccacaccaagctactgaagttacagaacaccttggggttctctgaaggcctctccataggacataacttctggcacctggaggtgggggtgggggaagatgttgatatcaagaccctggtgagatagtacagagtgtccaacatcagatggatggtgcactgagggtcctggaccagcccatgaatggcattttctcccttgtgcagagagaaacattaattgcttcattttagaatatttctctgtgttcagcatcagcaaagttcaactgcagatgggtgatggttcaagatcagggtttggctatgcggtccctccctgtcaggtgggcctcagaggcacccacagggggatagagagaggggctgagttcagggtccagcctgacccgcttccttgtctaacacatgggaagccatgattcagagaggggccagggcacctgaggccacatggctacctggatgaccatgcaggtgtggtttaagggggtggaggaggctatagagggaggatccaggcccactgatgtagtggtggggaggccgtttgtcttggatcctggccctggggctagctgggagaggaggtcagtgcacctgggctggggagaggagtcattaattcagtcagcacttcctgagcacacctgctagtgtgaggctctgctcttggcacttgggaatgttgccctggtggatgtgtcatcatcacagagaggatgccttagctgcccctgagggcatcctatttggttccagttggctgtcttcttcctgacactatgcaaggatctagatcttggggtgcagtgaactgagatcagggagagaggcagcagtagaggttcagaatggaggctgttgtctccaagaacaactctagggaagggagtggcagtgtcaccccgcatcgtcagctcaccccaaaggcctcctctgcaccaggcactaaggagacaaatgaacaagattgttgttctcaaaaaaactcccagtcacctgatcctttttcgagtgaacagtgctcaaatatttgcatcgtctctttgggtggatgtttcagatccatctgtcctttagatgatgagtttcaggagggcagggtgtttgagattctctctgcagagccaggcaccgtgcctggtgtgcagtggagagtcagaagggcttactgaataaatgaatgaatgagtatttgcatgagcaagtacgagaatgctgaaagtagctagggagtcaacaggagagtggagtttgaaaaaggcacgttgaaggacttggaatccaaattagttcaaccagaatttgtaggtacttgtcacctgcaaagcattgggtttcagtcacatgtgggccccaggaggtcctggataagggtacagggtggtgaggcacgggctgtgaaatccaccatgagacagagtggggttagctctttatggagggtgtgaagggtgggggaggggattgggagtggctgtgtggaagaactgttctcttctaagttttctggggtgacattaaagtaaagttctagtgaccaaacttctcacctggctgtgcctccatgagtagagggcagggctggtcatgttgtctgagtcttcctcccggcatccccgctttctccccaaggatagatgttatgctggaggcctgcaacttgttcattcattcatccattcattcatttgttccctcatttgattatttatttatttgcttgttcctctattcagtcactcagcaaatgttcatcaagtgcctcccctgtgcctggctctgtgttgggtgctgggggggaccctggtgaagccgatggtcacagtgtggccctcatggggttttggacaggcatacaaacaaacccaacctaatgtagaagacactgttcggggtgaggccaagataccgtggagatagacggaagggctctggaccgggacctgacatatcagggagggcttcctggaagaagtggtatttaatttctcccaagattactaggcacaggggcaaggagggattgcagagaggagttcccaacaggggaaatgatatgcataaaaggataccaagttgcccctctctgctccctgagaaaagggagtcctttctctttcacccaggctagagtgcagtggtgcaatctcagctcactgcaatctccacctccccagttcaagcgattctcctgcctcagcctcctgagtagctgggactacaggcatgcgccaccatgcctggataattttttgtattttcagtagaaatggggtttcaccatgctggccaggctggtctcaaactcctaatctcaagtgatccacctgccttggcctcccaaagagctgggattattggcatgagccacctcgcctgcccattgggagtcctttttcaaaacactaataggttgaagcaagatgaactggagggttatccattctcaagtcacactttactcccccttctttcctgatcacggttcgaaattggtctttgtccctggaatccatctatggcaggaacactcccatatctgagacagcagcccccagcagccctggttccatgagatgggccacctgcagccagctcccccagaacctgcgttgagggggtcagagtcagtcttccctcctctcccaggaggccagcccggcagaggctgggccagtctggtgacctgtgcaggagctagggatgctaaattggggacctcaagaccaaaaaggaccaagggcccagcccagccctggccagcctccatctgttagcctcagcgcagaaattgcaggcagcaggggacccgatggagtgcctggattttctccttagtaatgatcgtgcttacttaccggatgatgtgtatctgagcttatgtcttcgacaggtgcccctgtggacgaatctccctgggccgacttctataaatatttcaaaatcaagccccctttgatcactcttgcgtatgtgcattttacattatatttagttttgcaccgaatcaaatctgaggcctctgtgaaatgaaaataaactgttcgacacgatatcatagtccacaagtgctcaaatgtaaacggctttaatcaggggtaaaggagcagggaggtgtagcctgatgtctattccctggctgctgctgccccagggaggggtcctgcggaggccagggcctctggttcccagggcaggggctgtgcgctgaggctggtgccaggagccaaggcgggttaataggggattaaatgtctaacttcctgccatgaccaagtctgctttaaaaagggagcaagaaagccagcgagaggagagtaatcaatacactcctgacaactgctggtatctttttcagttttgcattattatgttaaagatataccattcattaaaagcatatatatatatatacacacacacatacacacacacacacacaggcacgcacagagagagagagtcagagagagagagagttcttgttgctttccttggtggggtggacacaattcagataaaaatccattacagagaattagggggctatctccttctcaaatcatcccatctgggtgaaatgggagccctgcttcatggcctagatgctggggtgtcagggctgagttgccattcccaaactgcagtccgtggatgtgacaccgtgggcaacgtcccctctccggcatggtgactgatcataagcttagaggaccagggggcttggaggactttccatagggtgggattctctatgagctgcagacaggaggctggtaacccacctactctcaccaagcttccattctgaggaagcaggatcacttccagcccgggtcaaatccaggaaggtttcctggagcacgtgaagccaggatgtagcatggaggatggagttgggctcacagctgtggtgaggtggggctgggctgctgggagatgtggggaaagtttctgcttctactttttcaccattaaaaagaaggcaaggggagacgaatgcctttttccaaaccctacactcttctttctcatgcacgcggagccctcatcaccacaagagctttgaccttccgatgtttggtttgtggtccaggagtttattttcatcctttactggtttaccatcttctctgactcacattggatagaacactgccttttctagctgcgcatagacagaaggtgtgtacagttttgaagctgttctcttgtaagttttctggagacaagactgtcacccctatagttggtggctgccctagtggaagctctgtggggctgactggatagtcttaggacctcagccgttggcgtcttttttataggaacctggtagaaggatggatgaggctctccctggcagtgtgaggcgtgcatgttatgttcttcctctgttaagagcttcttgagccgctgttttgcccaaatatgaactccattctgctcagattgactttcaagtctgcaccagcccatgcctctgccctatctcctctctgtcccctgagcattacaagctccatatacattttgtacatgctgatcccttgggcacatgtggcctacttctcctctctacctggtgacctcctcaaggctcggccaaggcctgtctccaccactgccttccttcccttctctctcctgcactcccatcccactgtgaccagcatgctgaagctctctgcaattcagcaggtgacccaagcttcatgagtccatccatcttccccccacttccccaattcagcttttaaaggcaagggtctggtcttgcttatagatctctagatgtacccatgtcttgccacatgtaggcattacaaaatgttatcaaaagatgccagtcccactatatagatcctctgataagactgacaacaggagcatttgtttgtttgtttgtttgtttgattttgagacagagttccgctcttgttgcccaggctggagtgcaatggcgcgatctcggttcaccacaacctccgcctcctaggttcaagcgattctcctgcttcagcctcccgagtagctgggattacaggcatgtgccaccacacctggctaattttgtgtttttagtagagatggggtaactccatgttggtcaggctggtctcagactcctgacctcaggtgatctgcctgccttggcctcccaaagtgctgggattacaggcgtgagccaccatgcctggccaacaggagcatttttattaaccacctttacatgccttggtcatatccttcccctctcagcatgtcctctgctaccaaattaagggggcttctggatctaaaaactatgctaactgctgcggtcagcatctaagaagcattactgcacaggtagaaaatgcctcatattctctcccacaaccccctgtgccctctcaaaatcccttgaagtgaataggacagcctatcagtctgttagagcgataaagaaactgaggctctggcaggggaccaaggtcacaccgattctagtgggagagcaggcaattggattcatgtcaatggaacttcaggtgtcattctctttccattactccagtctagttgggggaataagccacctgactctacaggagaatgtggaataatgtatcagcccttctatatattaagaaaatagaagagtctaaagataatttttagggggtgaccctctgctctaccagccagtgagtaacagacctgctacatttctccgtctgcagtgcctgccatgtctgccccacttgatttcactgcctggcctgtgtctttgtgcgtcttctgttccttggcctcctcagagcttgcccatggctgtggcttccttctttccaggcatttcccaaatgactgagctgggttccgactgtcgttatccagcccaacaagaataaatgtgttgcaaaaagccagcctggccactggcatgtcttcatgacttaactttctgagcccctatttcctcatcttttgtattggaataacatagcaccaatcatctaagattgtataaggctaacatgagacaatgactgtgatgtacctagcagtgttggcaggtggtattttgatggagaggaggaagatgatgaagatgaggatcctgttaatgtacatagtgatggtggtggccatgatagtgatgatggtggtgatattgatgataatgatgatgatggtggtggtgatgacgacgatgatgatggtgatggtgatgatggtggtgatggtggtgatggtaatgataatgatgatgatggtgataatgatgatgatggtgatggtagtgatgatgctgctgatgatggtgatgatgctgatgctgatgctgatgatggtgatgatggtgataatgatgatggtgatgatactggtgatgatgatcgtggtgatgatggtgatggtggtgatgcggatgctggtgatggtgatgatgatggtgctggtggtgatgatgatgctgatgatggtgataatgctggtgatgatgatgatcatgatggtgtgatgatgatggtgatggtgatgatgatgctgatgatgatggtgattatgatggtgatggtggtgatgctgatgatgctgctgctgatgatgatgctgatgatggtgatgatgatggtgatgatggtgatagtgatgatgatggtgataatggtggtaatgatggtgatgatgacggtgatgataatggtgatggtggtgatgctgatgctggtgatggtggtgatgatgatggtgatggtggtgatgctgatgctggtgatggtggtgatgatgatgatgatggtgtgatgatgatgctgttgatggtgatgatgctggtgatgctggtgatgatgttggtgaagatgatggtgatggtagtgatactgctgctgctgctgatgatgacgatggtgatgacagtgatcattatggtgatgatgatggtgatagtgatgatgatggtgataatggtggtaatgatggtgatggtgatgatggtgatgatgatggtgatgatggtgatgctcttgctgctgctgctgagggttgttgctttttaatgagaggacagtccatagtcttaacaactaccccatgtgaacttgtcttctttccatccccagcagctacttgcctggctttgtgtggtataggcagaaggtgacccagggatccagaccagaagtcttctctactcagagaagatgacaggagaacccctttgttgccatttttcttttccatctgatgttgttgtgctcattatctgtcttcatttctgggctgcagttttagcagagactccaaaagccacagtgatggaagctctttgcctttgagaatttttttttcaccaaacccaaaccaaaaatggtcacgtctttgagaattttgaagtcatccaaagtttccagggagaagacattcaaattcttttcccaaattctccaactcttgtcctaccagcatggaagctgcctggggctccatgggaccacatattaagccagcccagccaaatcctgctcactactcaagtcagtgagggccttgactttggccaatgttccatccccaaggggacacttgggaatttgactacagtctgcaacttgactctgttggttacacagttgtcattctccacagcctgatttgaatgtggtatttttgttcataaattcagcaaggatttaactatttctggccccatctcatggcactgtctacacatcagtcaaaatggaacaggtcacccgcgctgccctcctgttcatctattaatcatctggcaaataaaccactcagtatcctgcccaccccagtaatgtttgtgatgtaatttgtttggatgcccaaatgtcaccagtgttgattgtaagagatcaaaaaaaaaaaatgcacttgctcagcatagcaagctctaggccaaaatgtaagcatgaaatctctggtttatttttgtaataatgtttacagctgtttaatgaccctgaaaaggttcagtagtctgatgttctgtatttcagaacaggagtgtattatgcttataacaaccttagttaaacagtttgagctacaacaattggaaaaatagtatttaatacgaagccattgtattctaggtgaaattgtcttaattactgtttactgtcagcataagaaagcaaggtgggcttcagggacagactgagggtcacgtgagcctccaggaatggggtctgcctgttactagaagtgcatgttatgagaagattttgagtaaaatccacaatggtgtttggaaacccccttgctgtgaacccgagtcctagaccctgcagagtaacttggaggtcagggactcctacaaggcttccgaggtagcagtttcacccacgtcgatgaaaaagggaatatatttagttgtgcttggctagacaacaatacttgattttttaaaatccagtgcaaatggttattttgaaagcattttattttccaatgattctttttcgtggtataaggaaaaagctctttcatacaacttactggcaagatctatatttttttggactattcataagattacttttttttttctgtgctagcaaaatgaaactgtgtttttgtgtaaaatttatttagactcgtagcagctggcatctctggtgtcctgatagttttaaatttcattttgagtgaaagatacaattaggttctctattggaagagttaagtgaaaacttttgtcattgatatcacaggaaatagtcttgaaggcagaaatgcaaaatcaaaataaccattagcaccatcaaaggcagctgaatggctcacggtacctgcaatgatggcagtgatgagacagaatgtattttgataatctgtgcacccaatggtgggtttcatttgctgagtgtgaaattgcattgttcaagaagaaaacctgtaatgtttggaagccttcacccggggcccctgcctgtgtttagaggtgcagcacaggggtttccacactgtcgtgaagaatcctgtggccaccgagagcctagcttagttcttcatcaatactgactgtggagttgagtccccaaggtgccccaccatgaccctgtgctcagaaaaggtcaggactgggggggaatgttgccatgtttctacattggggggatgatgctgcaaactcaagagtttacagtggcctttaactgtccagcctcggtaaggacatctggctgcctttgcagagttaggtaaattatgcattcatttgttccttccatcaatcagccagggtttattgatcctcttccttataggtttcaggctggggcaatgaactgaaggccaggggcaagctgttctcactgtttagtagtttgtttgcttgcttttaattgtgctaagggtttttctgcccaggtgagctggttcgatgagttcttgcagaggttattcaaagtcctgactgcccagttgccttaagcccaggatcatggcctgccctctgctggcccctggcttccttttttaaaattttagactcgggggtacatgtgtatgtttgttaagttacatgggtatattgcataatgctggggattgggcttatagtgcacccatcaaccaaatagcaaacattgtaccctataggtaattttatcaaccctccctcccctctctccctccccacttttggagtccccagggtctattatctccatctttatgtccgtgtatacccattattgagattagctcaacatggattaaagacttaaacataagatgtgaaattataaaaaaaaatcctagaaacacctagaaaaacctcttctggacatcagtccaggtgaataatttgtgactccagctcctgggtcacgcagtgctgagtgaagggtcagtggggcgtgtaggctaaagtgctctggcagcagggttgggggtgggctgtggcaggaggcccctccagggatattccctatggggcctgtaagggagcagcatggtctgaaagggaaggctcactccctggtgggctgggaaaagggataataagaccttccagcaggtcttttatttgaaattttaaaaaattatcttttaaattatttttgttttttgagacaaggtctcattcccatcgcccaggctgaagtgcagtggtacggatcatagctcactgcagcctcgacttcccaaggctcaagtgatcctcccacctcagcctcccatgtagttgggactacaggcacgcatcaccatgcctggctaattattttatatttttagtagagatggggctttgccatgttgcttagggtgatctcaaactcctggggctcagcctcccaaagtgctgggattacaggtgtgagccgctgcgtctggtcccttccaacaggtcttatcgtttgcaggcagctccacttcctccagccccatgagctcttatgtctgcagctggattcaatcctttaacagtaggataaatgatgccttagtttcccagtgtaggcatttgtatacatttctagagggctatcaggtagggactccccacccttccctcaacacagacataattattgcacacacacgcacacacacacacacccttagacaccaaagctgcgatggtttatcttttccccagctttgcattcagcctcgaagggacctttcattgctccctgttacttgtggacactcactcacgctggccccttagatgaacaggccctcgagggcaggtacatggaaggtccctggcaaatattgactgaatggctaaggtaaggaataaacgcattctggatgggtgaagtgtcaaggctggagaaattggggccgacccaggttttgtgagtcccaggccgggcctggggccagcttgtcctgcctcggctgttttggcgcagagacagcacaccaattaccccatactctttccaggaactcgtgcttccctttcttgctctaagtcgagcagcaggcatcagttatgactgccccattgcagcggcctcggctgcacctgctcgaggaatcacagaggattctaagctgactgtcgtggtcctttctcccagtaaggctctgtgcaggcttctcccaggcttattcaagggctggggaccagtatcctggaagcatctcctagggagctggtcagctcctctgaaaccctggggtctcccatgggcagtgacggtcagttaagttctaaagggaaccattgctgtgtctcctagtattcagcaactgggccatcaggggtggtccaagcctggggtgataaccatggacacctagactgtgagagttaggggtgtggacagcttttcctttccttttgtttctttctttcttttctttttctttctttctttttttttttttttttttttgacagagtctcgctctgttgcccaggctggagtgcaatggcatgatctcagctcactggaacctccacttcccgggttccagtgattctcctgcctcagcctcccgagtagctgggattacaggcacccatcgccacacccagctaatttttgtatttttagtagagacgaagtttcaacatgttgttcaggctgatcgcgaactcctgacttcaagtgatccgcccacctcagtctcccaaagtgctgggattacaggcataagccaccatggccggccagaggtggctttctcttggtggtttctgaaccttcagcttctcagtggtagccagggacccttccaactctgtccgattcggatcgtaggtgctcatggacttgtgcgaaggctgaggttaggtcacatgactgattttaagggctctggacttgtgcaaaggccgaggttaggccacatcaagttgaggttagagtgagtctctattcactcattcatccattcacttaggacacactgaacctaagataagccagctctgccttaggacccaaggcttcatccttgaccaagacagacatatcctctgccttcacgggaatgaagtatgtctgtaaaaggaccaatgacaaaatgttgcccccatggcaaatgctatgtagaagaaagtaacatgttgggacagagaggggctggggtgtcagcctcagacagggtgggcacagagggcttttgtgagaaaggatgtgtgagctcagacccacaagaataagaacagagccaactatgaaagagccggggcagcatgcatgttctagaacattctatcctcagctgaggatctagcaaaggcatttaaagaccttaaagagattacaaatctttgttaactctggccaggatagatagatagatagatagatagatagatagatagatagatagatagatagatagatttgaaaaaaataaaagaattccatactcaaaccaaatctgaaaactctcacattccttatttgacgagttgagctgtcacttgcatagcatgaatggtggtggtgttgggggacatggtcttcaactccatgcccctcatccaagctgatttgcagtctcgccgcattgcacattcagccttctttccctcctgctgaattggcgtcagctcatcagcagcaacctgaaaatagcccgtcttcctggattcatgtcttctgagctggccaactgggcagcctttggaagtgggccagccctgttggccttggactttccaaacttccatggagctgttgggtggaattctgagcaatcctgtgtggcttcagggtcatgatccctgttggctcagaagaggagccagtgcagctgtatggggcttgaaggtggagagagggtgccagacagggccctggggccaccagtctctgcctggagcctccagcaacctctgtacactgtgcctgctcctccctgctggatagtgggtgtcatgagtcctggggctggtgggtcttgtccaccatcatgtctccagtggcaaggctagggactggcacatggaaggatctcggtaagtctgttgaatgaatgcagcaacctccatgggatattagcttttttctgaccaacctccaaaatgggcccgcgtattttaaaaaaatttgagtgtagactgcccccagaagcaaaaaggaaagatgacaagctggaagccttctcctatggcaagtgcccatgcacctttacgctttgcacagttgtgcatatctttcattcgtggacaaagttggcccagcaccaccactgtaatccctctgcctcctggaagtaaacattcatggctctttcttcccttcccttgcaagatagactcctcctgccaaggaagtcaggtctcccattggagaccctccatgccacgcagtctcctggcgggaggcccagcaagcagcagaccctgccgaggctgcctgtgcttcctccacagttgagctctgtccccataggtctccctggttaatcacttagcccagaaatcagtcccggctggggttaagcgcagctcctggaccacctggctgcccaacacatctaaacaatgggatgcaagaggagaggtgtgtgcaaagatgattccaatggcaggaaacaaatttggactccttcaggtgggagacatagctggaaatagaaggatcccaggcaggggttcattgccttgcaaagctgagctccccacgtgctccaatgtggaaggggctgtttcctctgccctccctggagccatctggctttagccattctgcacaggctgaagagggggcagagaggactattaaagacaattatgcagaccagctttgaacgatagtgtttaacaaacaactttgagttctaattttctgcaaaacacatactgcaggtacaatttgtactcattattgtatattgggaaagttattaaaaacactcaaacttggttgagacttcctatggcatcattcctggattttaatgggtttttatctagttctataaaagacctctttaaacccaatcaaagtccctgctttggatatcttgccattgaaggatgggaagagccccattataaggtatcggtgtttcctttgacccaaatttgaacaacttcaacaatctgctaagattccgtcaggagataatttatacttcttttgatgggcacagttaccaaatgataaaataacagtgtttcgtaacataagggttaaatcttaatctctgaggtttgcaaagccgctactcgcagtctccttaaaatttaatatacctcgttaatgcttccttgcaaacactgaaggatttttatgattataatcatgtgttacagcacctagtactgtttctaagcagcatactaatcagcttaatgagatattactgcactttttgttgactaaagcaaaatcccttttattattctaaagcctgtcctttactttattttttcccaaaacattatcttgttttattatgtaccagtaaatatcatgccattgagtgttttttgtttgttttttttttttttttggccaaatcataaaatgatctctttcatctcagactggtgaatgtactgaatatagtaaacggaaacagaagttccaagtgggtttatttggtcttacagggaaagtcattctgctctcaggcaaactttggacggaaccaacaggtacaggtgcgacaatggggcaacggagaaaaagtttcacacgtagacccttgatttgttattaggtgttgaaagtggtaaaacattaataatttaaaggtgaatgaataattgcagtctgtaaatagaaaatacaaggaagacgatctgtcgccaaaacaaattggaggagcaatgccatattgcataattggcatttaataattcatttttttattattgtttttgacaagaattccttagcatgattatgtgtaggtaaggcatgaaatggaaattccctgcccgccaatgctgttgattcatggcgccacagccgcacctggcacggatctgaactctgcctctcttttcagggatggaagaagcgagcctgtgccttggagtgtcttcggcggagccggaagctgagccccacctgagtggccccgtcctcaacggccagtatgccatgagtcagaagctgcaccagatcacctcccagctcagccatgccttccccgagctccatccccggcccaaccccgaggagaagccccccgcatccctggaggagaaggcccacgtgcccatgagcggccagcccatgggcagtcagatggcgctcctggccaaccagctgggccgggaggtggacaccagcctcaacgggagggtggacttgcagcagttcctcaacgggcagaacctgggcatcatgtcccagatgagcgacatcgaggacgacgcccgcaagaaccgcaagtacccgtgcccactctgcggcaagcgcttccgcttcaacagcatcctctccctgcacatgcgcacgcacacgggcgagaagcccttcaagtgcccgtactgcgaccacagggcggcgcagaaggggaacctcaagattcacctgcggacccacaagctgggcaacctgggcaaggggcgtgggcgtgtgcgcgaggagaaccgcctgctgcacgagctggaggagcgcgccatcctgcgggacaagcagctgaaaggcagcctgctgcagccccggccggacctgaagcccccgccgcacgcccagcaggccccgctggccgcctgcaccctggccctgcaggctaaccacagcgttcccgacgtggcccacccggtgccctcgcccaagcctgccagcgtgcaggaggacgcggtggccccggcggcgggcttccgctgtaccttctgcaagggcaagttcaagaagcgcgaggagctggaccgccacatccgcatcttgcacaagccctacaagtgcacgttgtgcgacttcgcggcttcgcaggaggaggagctcatcagccacgtggagaaggcacacatcacggccgagtcggcccagggccagggccccaacggcggtggcgagcagtcggccaacgagttccgctgcgaggtgtgcggtcaggtgttcagccaggcgtggttcctcaagggtcacatgcgcaagcacaaagactcctttgagcactgctgccagatctgcggccggcgcttcaaggagccctggttcctcaagaaccacatgaaggtccacctcaacaagctgtcggtgaagaacaagtcccccagcgaccccgaggtgcctgtgcccatgggcggcatgtcccaggaggcccacgccaacctgtactccaggtacctctcctgcctgcagagtggcttcatgaccccggacaaagccggcctgagcgagcccagccagctctatggcaagggcgagctgcccatgaaggagaaggaagcgctggggaagctgctgtctcccatctccagcatggcccacggcgtcccggagggggacaagcactccctcctgggatgcctcaatctcgtgccgccgctgaaatccagctgcatcgagcggctgcaggcggctgccaaggctgcggagatggaccccgtgaacagctaccaggcttggcagctcatggccaggggcatggccatggaacatggcttcttgtctaaagagcatccgctgcagcgcaaccacgaagacactttggcaaacgccggggttctgtttgataaggagaagcgggagtacgtgttagtgggagcagatggctccaagcagaaaatgcctgctgatttggttcacagcactaaagtgggcagccagagagacctgccaagtaagctcgaccctttagaaagcagtcgggattttttgtcacacgggctgaaccagactctcgagtataacctgcagggtcctgggaacatgaaggagaagcccaccgagtgccccgactgcggccgggtgttccgcacttaccaccaggtggtcgtgcactcccgtgtccacaagcgggaccgcaagggcgaggaggatgggctgcacgtgggcctggatgagcggcgtggctcgggcagtgaccaggagtcccagtcggtgagccgctccaccacgccgggctcctctaacgtcaccgaggagagcggggtcggaggcggcctctcccagaccgggagtgcccaggaggacagcccgcacccctcctcgccatcctcctcaggtaggttagctgagaagcggggagaagcagcttgtacagcagccctgctcagggctgcctggttctgctcccaggcctccagtcagttccaaggccagtgggtcttgattgaggacaggggtgggttggacactgggccatgcctttctttccccccctgactggagggaaagggccgtcctttcacctcttaggccttcccttgaacactggctaccaagaaagtaagttgaggccgggtgtggtggctcacgcctgtaatcccagcactttgggcgcccgaggccggtggatcacttgaggccagggattcgaggccagcctggccaacatggagaaaccccatctctactaaaaatccaaaaatttaggcaaatgtggtgatgcatgcctgtaatcctagctattcgggaggctaaggcaggagaatcgcttgagcccgggagggggaggctgcagtgagccaagatcacaccactgcactccagcctgagcgacagagtgagacactgtctcaaaaaaaaaaaaaaaaaaaaaaaaaagaaagaaagaaagaaagaaaaaagaaagttgtgcgggagatggccaggtggtacatttttcagtgggcataatctacctttttcttgcaattgtccaaccccatttcaccgcctgacgctgtcggccatcatctggtctctggaactcaggagctggcattctgctctatccctgggtatgaatgtgtaagttccaaacttcaccatctttctctcccccttagcgtattcccataattctctcatgcaggcaccgcagtctccctccccaagccaaacctatcttctggccccttccaaaattacaacgtggctcacctgccagatccgtgtgacctaaagagccccaccactttcctctgatggtttggaaaagtacaggcatttgaaacacagacgcatgactgttctgtcttaaattgtactgtgttacacggctgatacagctttggggtctaaaatagcaaagcagaaaatctgtcatcaaaatgtctgtgaaattatgaagcttcctggcccagtttaaaaaaaaaaccaaaacaacaacaacaacaacaacaacaacaaaacacgctagcctcagacggctaaattaaaatcaccacctaacagcaggtaaggcgttgccttcatccatatttccaaagccccttactaatggatagtaaattgaaagttatctctagccctttataaagaaagcacctcgctaatactgtaatcattctgcagcctaacaacagaggaaatcatgccataacaaataccctgttactaatggcaacattgatttctgcaatcagccattaagtctagaaaatgaaagacagtttgaggcacctcgaggcactgccttgcccactgttaaagacgtagcagcaccctgttgagggtcattttttaaaagttttttcttctttcttgatcccccccaccctcactctttggtttagatacctatttcgatcttggaggcaattcactgctgcacttattaagtagatgccagttttagctttgctgttatagtcttgcttaagcatactcttcttctaggacaaaattagtattaaaataaagtgggactctgccggcttattacaaaccagtaaagaattgttaagacacataaatctggtctgcacattccagagattccgatagcacttaatgccgctgcttaaatacccatgaaacacactgtctactcctggagtcctagacttgtttgggatttattacggatgagacacttaggaagtgtctaaccagcagcatgagtgccaaggaggcgtgaggtcacactacctggagcgactgtcacatggaacatactaagattcgagggaagggttttcaccatgtaaagatagatccctacttgagaggcagccaagtgccaggtgtcccaatgtcaggaggagctctttctggcctcctaggatgaggtctgctcttctggcatgtgtcgtttctgattctggattaggacctttacaggacagggtgcagacagcaaactggttcccctaagtttttagagtgacatggagttaacattgacagatttccatccctctctcagacctcctgaaatgtaagggtctcggcagaatattctgacaccaaatgttcagcttcattaatgacgtgtttaccgtgtttttctcaccttctggccaagtgatagcctcatgctattcctatctctgttgcttgcctatctctcagtgcttggttgaaaaaacccattttgcttaaaaagaaccaaccgtgctcatgactcaaaagagaattatacttgagttgtggttatcttctcacttttatttcccctcattgaagtattttacaattgtgaatactgattctttcatttctggttgacttctttgttttcttcatattcaaattagaccctttcataattttctgactaagtaggagaattgagggcataccaatatacaacccgaatcagctgtgcgtctggggcattcaggtttccctgggatttaggactcttaaccaaatctggttagtcctccctcttatttccaacaagtttgacttgtatagaagtgcgattaaaataagcatttaaataaaaatctggatacaatgggtattttattattacctgttaaagagaaacctgcaaggtgaaggagagagagagaaaaaatctttaagcccttaagtaaagaaagaagtacttattaaggcttctattaagaaataactgcaaaacacggttttacaaatttctcagactgcataacaatgtcgcaaaacttaatttgcatcacttgattcttttttttgttgaaaactgggtcagtagggcctgagaaactattttttcagatcttaaccaatgaattcttctttataaatcgctgctcttaacatgatagtagttctgaattcatcataaaaaacctttttacagagcctcttagaacagatctctagaagaaggcttacaatgagtggcagagacgtcctttgttatctgatgtaattctttgcaaagaaggattgggaacggagtggctgtttaaaaatgtcttgctcagaccgagatgaagaaggggtcaagtttgcaatcaaacagttattgccgagatgggcgactgtcactggctaggctaatgtgggatgcagctgtttgttatgtgagcaaaagaatgtttgaatcagtgaacatgtgaaaatgattccagtgaaccagaaaatgtgtttgttctttggctctccaaactgctgagaaccaagcttaagatcaactgcgaaaactaggacctctgacaaattgagaggtcatattttctaacagaaaatggacaaaactagtcacacagatcacttccccatcttccccctttgttttatttttgttttgttgttgtttatttgacttaccagtaatttcacaccgtggtcaatgtcattcaatgtagcctccgtgtacaatgcaaagagaaactgtttggaaagcagcagcttattaattttacttttatggcatttagaaagcggggtggctgtttcgatgcctcctcatttctggcttgcatgcaaacactcttatggcattaatctttgcatctttctctaaaacctcctctagggctgagctcgaatcctcgctttgctctgagtcagaacacaaccaaagttctgtttcttcagattttgctttggaaatcacactcagaataattaaaacttaatgtactaagaaatgatactgttcattatatccaacagggcagttaccttctgaattccacataattttggagtggggataattgaagtgttgatggtgggaagggggtaattgaatgcattgaccctctgttcattaaataaagtcggctaagttacaggatcaatggaaagccagggagagatgcgaagatgaaaatatcgttaacccctactacttctggtataatattttgagatggacaaggattatttggtcagctgggctaaaagccttgcgaggtcttcttttgttgttagagctgcattcctgaaatgctgggtctccatcccattgaccacagcatcaaaggcctttatctggggcgctttcgcatttacatggggtgtatagtgatatgatagattttctttcttttccacctctttttctcatgtggctccccctccctgcccccgttcacgataaccggtgcctgctccacacacaaacaaatccaggcacccaaaagaagaaaaagaaaaagaaaaagaaaaaaaatttgagtttgaggattaagatcttcatttttttttttttttttgcttgtgcattccaattgttcttaaaatatttggcaatgtcaattagtaactgagcagagttagctgatgaacacaattttccagtagactgagcaccctattgttgccgagcgaacagcagatttctgaggtcattatcattcgctggttgcttggcccagctgcttcctgctgcaaaagccaaactttataccggagctcggggaggctgcagcaacagggggctggagggggggagaggggagctggctgcagagccgaagacagtcattatcagcagaggaaacagaaagtaaaagtttccaggcaattccaggaaaactgccggagcaggcttcttcctcctgttccagtccaaccaccttccacctctaggcagggaattaaaaaggacttggggagacccccctgggcatggtggcagctaatctctttgtggaggagaactttggaaaacaataatcccatttataaataatgcttaaaaatttttttagcccaggctcaagcatgtgagtgatgccctcttagatagcctccttcattgttatatatttaaaaaatcattttaaaaatgatattaggaacttgaaattagtcaatttggggatgacaaataggcaacattatttaattttccagagggaccttatgaacagatcatagtctgagattccttttaaaatcacatttagccttaaaggttccccctacgcctccccctgtcccctgcttccttatttttctgcccccagcccaccccaactccagccttccttccccacctcctaatttgggaactggttcagtgagatgaaaagctgcactttttttaaagctcagctgtgaaagccgagcgccatatgcagcccttcggtctctgccgtggaagcgtgtgcaggcggccgccgtgtttgcggagatttacggaggatcggctcgtgtgtgccgaagctgtgcccaggcggacgccggccaaggcccgtcccctgagctgagagccgagagctgaggtggccgcccgcctaggcgaataagccggctggtcaggtggctcctggggaatgtcagatggggcacagggtcagaggcccccgtgtcttcccctggcggccacctttccgctggggcccaagggtggtctgtccacttgggacgccctgctcgtgccgggatcgccgttgctctcagatgctggttcatgtgcggctgtcacatcatcctcctccttccccggagccggatgcctaccagcagtttctttttataaacttcccattcacttggtagacttgtatcatctcgtgcttaggagcgatgatttgggaacaatcagtaacacttcggggcttttaccatctttctgacccctttacatggagccataaatcccgcttctccggggctgcttgatgccagtccaccgtcacttggcatttcagaaagagggtacttgcacaggctctgaaagtcttcagactaggagtgtaacatcagagatgtgtggcataaaattgcagaggcagagcaccctctctgctccagcacttaacaggcaggacatggttttgcttgtgagggattagattcgaggccgcggagtcactcaaatgtgtttctctggcggcctcacttggcccatctgtgggatggacaccgctgttgcctgggctgcccttctgtttccaacactcctgcccacggagcttctgaggagctccatgaagctctcctccctatgcatgttagcgcaagggacggaacagttcatttaaacctaaatttaatggaaataaggaaaacatagattagctaaggacaggttacaatgaggcaaggaattaagcggtcaattttcaaaacagagcttgaagcattagctgcgtgatttccattgactcgaatgggaggttccaggctcaggtcttgaccaccaccttgggtgtgttggggtgggagttagtaatttgctttgcagacagccacaaggtgtcccttgattgatggtttggccagaagcaggtatcacgagcttccaggatctgactcttacccactcccatgcttaccatgcactcaggtagctgggaaatgatgcccactgtgttatgtgagccctgccaggggccacttctgcagagctggggcagcctctgcatagagggcagattggggtccttctggccgcccagatcccttcactgccaggttgcttatctttctaattctttctctggtttgaagctttgtgtcctgttcataggaagtgcgttcccaggaagggtaaggtaagactttcttcctctacatctcagtgcatttcccacgtctgccccttctccctgagaagtttctggcaggtagccctgatgtctcaaaggggtggggacagggctggcttcaacaaggcctgttatactggcctcgatattccactggttctagagagagaccgtgggtatacttggagacctagagatggagacagtgaatttcatgggaaagaactgtgcagggagcatttggaagccttttgagcctgggaagtcaggggagtgagtagttaactcctttacccgtagagctgttttggagcattgatggcaggggtggagaaacacctgcagagatcaggagattggatttgtgcacacttcccaaatccgtgatgattggactggaacctttgccatctgtgacccttgggcctgtttgctgcccttctgggtgtctcacctcccttcgtcttcctctcctctgtcggcatctgatgggtgcatctctccacccttgttgatggtgctggcatgtggaggaaggaggcgggggctgagcgaggcttgcaaatgcagaggaaaggggctctccaagaggggtgcatggtgtcgggggggtgggcaggtggtggggggactctgatctccccaggaagtgagctttgctgcagctgagagcggccatgggtcccccttgtcttttgctggcaggatggggcgatggcaacatttacttaagctgtggagtctggcactgccgcagccaggcgccatctggaaagcccttttcagaaagctgtgtcccccccacccccaaaaggaacttaggggaacaggacttgggcagagctgtgggacttgtttcttgggcagaacctgctcactgaggcacctgagccgggctgggtttccctgggagccaggtagataagacaggtctacctcggggtgcatgtgggctctttgctgtctgtggggccctcggttcatcctcgagccaggtctggtttaggtttactagggctgtattttccatctatttgttttgtgttgcattttgcttactctcttcacctaagtccttgtatattgtgagtatgatggggtggcgccagccgggattggtcagtgactgttccttccctgtaatagcagggctgattagcagaatataagaaatgaatgctgtgcctctgaaatgtgcctgtgagacaggatctagaactcagcggctcagcttgcaacaaacagggcaaactaagcacagagatttgctaccatcctttccctgagccacatcttcaaaaaagactgcagagtcccaaaacaatgcgtgtctgaacaaacaccatcttcagctacctgatgggtgggcctgggcaaaacgggggccatgccgaaagcaagggcagcagtccaggcagaattcatttgcctcctgtttccaccacccccaagagaaagttgtccagggcttagcttcttgtgggacccatctctttgttgctgtgagccttggggtttttgtgtgacatgtggcatgtgtctgggagaagcgagaggcacagcacaagctgactccttggcttggctgcccaccacaccacatgggaggccggccctccccttaacggtgcccagccaggaggctgcctccaatgtgggcatgaggacgggcttggctttaacacctcctcacttgcttccaaaggacagggtcattttccagcttttcttgcaagcagtgtctacctttaggaacctttcagttttactctgtgccatggggcccagggcatttcacggagaaatcagtcctttcctttacagaggcaacttgtaggactagacttttggccaacgctagtttcttttcttttgtctgacctcagttccaaaaccatttgatgcacgatgaaacaggatcgcgccacagtgctctcttctcttcattaaagtaatgtccagaaactcttagcacagtggtggtcatcgtggcttttggacactctcagttgtcctcaatcatcttgagaggcattctggaacatgttcaacatgttaacgttgagttcaacatgaagtgtatgcagtggtggttttcttgaagatcaagacagatacatgcttctctttattgctaaatatgtatatttttaaatttgttgctaaaatatgtgtttttattttcgtttcatttcattttttaaaaactcagtagtttgccctgaaaaattggagtgatcctgcagcaaagctgctatgtggcatcataatccctgttgagagagaaggcttggcagtgttcatgtccgtctctggctggggccagacccctcggaaatgtcctttttagtgaccttcaaaacctttccacttgggaccgggtgtggtggctcactcctgtaatcccagcactttgggaggccgaggcaggtggatcacatgaggtcaggagttcgagaccagcctggccaacatggcaaaaccttgtctctactaaaaatgcaaaaattaaccgggcttggttgtgggcgcctgtaatcccagctactcgggaggctgaggcaggagaatcgcttgaatccgggaggaggaggttgcggtgagccgagatcaagccattgcactccagcctgggcaacaagagcaaaactccatctcaaaaacaaacaaacaaacaaacaaacaaacaaacaaagtttctacttggtctcgtccacgagtcccgttcactgactttatgatgctgttgttgttcaatgacttcactattctttttttcttactataaagtaattcttgttcatcttggacatttaagagatacagataaataaaaaataaaaaaaattaaatgtgtatgcctaccaccactcaggaataatcactgtgaacactttttttttcactaaactagtaaatattttgttatcgatgcatagtttatgtatagattttagggtacctgtgctaatttgatacattcatataatgtgtaaagatcgaatcagggtaattgggaccttcatcaccttaaatatttatcttggctggatccagtggctcatgcctgtattccaacactttgggaggccgaggtgggcagatcacttgaacccagcagtttgagaccagcctgggcaatatagcgaaaccctgtctctacaaaaaatacaaaaattagccagagcggtggcatatgcctgtagtcccagctacttgggagggtgaggtgagaagatcgcttacgcccaagaggcagaggttgcagtgagatgagattgtgtcactgcactccagcctgggcaacagagcaagaccctgtctcaaaaagtattatcttttctctattctagaaacatttgaattattctcttttggctattttgaaatgtacaatagattattgttaactctcgtcaccctactgatctatcaaactcgaggtgaacatttttaattcatacttttccagtcctttttatgcaactaaaaatgtagttagccaaaaagtacatacttctgtgtaagttcttactgaaatgtatgtcatattttttcttgtcattgaacatttcccaccaggatcagcaaagttttcctgtaaagaaccagctaatgagtattttcggctttgggggccatgtggtttctgtagtaaacactcaattctttcataaataagagtgtgatggtatttcaataaaactttattgaaattgcaaaaattggcaatggttcagatttggaccctgggctgttgcttgcagattcctgtcctaatagtaatagttatacttttttttccccaagctttacacaagtaatatgcacatggaggaaatgctagaaagatggagaatccaagaaaaactctatatctataaaatggtttagccaatctctgattcgtgaacacgggacttgtttcttttcttttttttttttttttttttgcctgagatgcaacctctgaggtgtacgtttctgcagcatttgtgacctcatcgatcattctgatcttctgcaccattatttccttaggtgtgttgcctcgcagtagactctctggtcacaggctggtgagtccgaggtggcagagctaaaccacccactgtgtgctgcggctctagactgtttgttttacgctggtgtttgcaccatgagaaaatcccctcgtaagattgtactgaagcctgtctccctgaagctaggtagttccctatcaccacgccactctgtgacttatttgttcattcataaatacactcatttgtttgttcaatcattaattcacttatttattcactgaatgatgaaatgcttattaagtggcttctgaacactgagcaaggcatcaggtgctggagatgcaaagatgagtagaggccgggcacggtggctcatgcctgtaatcccagcactttgggaagccaaggtgggcagatcacttgaggtcaggagttcgagaccagcctggccaacgtggcaaaaccccatctctactaaaaatacaaaaattagctgggcgtggtggtgggcgcctgtaatcccagctactagggagactgaggcaggagaattgcttgaatccaggaggcagaggttgtggtaagctgtgatcacaccactgcgctccagcctaggcaacagagcaagacttcatctcaaaaaaaaaaaaaaacaaaaaaaaagatgaatagagatgcatctcagtgtctggaagcccacagcctctaggtgctggacaggtaattcacagagtgagacagacacatgggagggtttaccctggggcctgtgggagcaccttggtgcccagtttgttctcaaaggatctgaaagggcaaggaaccacttcaattagctcagcgacttctttggcaaggaggagtaactctttccctctgtagaattaggccaatcctggtgacttcctggaggaagcagacaagtctcttttagccactgtggctggctgctgttctttccctggctgggagccacagtctaagtaaatgccttgtcacatacagaagaggccctgggagaagagtccagtgggtgcttcccaggaaggcatcccaggctgggaagggagggagagggccggagcaggatgggagctgctgaggcccagtgaaagctttgttgcaccctacacaccacatagggggcctccccgagggagagcactctgggggacgcaggacagttctccacaccagaaagtgagaggcaggctcctggctccagctcatggccccctgaccatgctgtccttggaggcagtggctcatgaatggaggaagacacatcaggtggtcaggggtgtgaggctcctactgggaccctgcagctggagcgtgcagagaacctgtgaggccccacactgggaaggagggctcacattttatccatttccctgtctgccttaggaactgtccatacctgccccacaggggctctgggtgtctcatgggagggctgcacccccagtatgtcagaacgtccatctgcagcctgcagcagaggattgcaggcactcgtggatacggcccctcttctttttgggtggtgggtgggacatgaactgaacgagggcttgctatgagaatgggtggaagtgacttctagtcaattgccctttatcttctgatgaagcaaaacgtcatatacttagatattaagccagagacaaacacattttctcacgttaaaggaaaggctgagggcggaacgtccccacttcactttggagccgggccccacacacattttcggggccatgcgtttagtcatcctgctggactatttgggcagctcgctttccttctctgggctttggctttttcctccacatcatgggaatttgggtggggaagtgtagaagattcggagacgcctctcagcttccatttttccttcatctttcaatgtttcccccacctttctctcctctcccttcctaaatgtttccatggcttgggggtgattttaaagggtcttacctgctgttccttgagtagagaattaacgttcctagggtccaagtatttcctcaatttcctgctgtttttttttttttttttttttttgaccgagtttcactcttgttgcccgggctggagtgcagtggcgtgatctccggttcactgcaacctccacctcccaggttcaagagattttcctgcctcagcctcccgagtagctgggattacaggcatatgccaccacaccaggctaattttgtatttttagtaaagatagggtttctccatgttggtcacgatggtctcgaacttccaacctcaggtgatccggccacctcagcctcccaaagtgctgggattacaggcgtgagccaccacgcctggctgatttcctgctgatttttgcatctgagcttcatcgtgtcgtctctgagggacccatgtgcctggtgaggggctggggagactctcttctatctcatttcccgtgggccccccttccacctcccatctctcctggatgccatagaggcagagccttgcagctggaggggcactgccagggcccctgctttacccagcacgtctgtgagtgtgttaactgtggccgaggactctggtgctggcccttaggagctgtgtggcccagcaagggctcctcagcctctctgtgccttggtttcctccatgtaaaaatgaggacgatggtagtgtttgcctctctttataaagcccttagtgaagactccagtgctcaatagacgtcatctgttatgaggtttatttctacgctatacaatacaaacacaaacaggtgaaaatgggcaacttggccaggggagtggttggtttttcatttttatcattttcattttttttttttttaccccattgaatgtttatttcatttgggtacatctttctttttctttctttctttcttttcctttccttttctttctttctttctttccttctttctttctctcttttttttttttttttgatggagtctctccctgtcacccaggctggaatgccatggctccgtcttggctcactgcaacctctgctttcccggttcaagtgattctcccacttcagcctcccaagtagctgggactccaggtgcatcccatcaagcctggctaatttttgtatttttagtagagacagggtttcaccatattggccaggctggtctcgaactcctgacctcaagtgacccacctgccttggcctcccaaagtgctgggattacaggcctgtgccactgtacctggcctgcagagtgactgttgggaggtgtgcagctcacggggtcggcctcactggtttgtgtcattgaatctggtagccatttgtctatatccctagtgcgatgttgggaccagttgtttgcatcaggctctcttcgctggaggttgattagggtgcccttgtcgagcagtcactgatgctgtcctaggcaggcagctttccttctctgtgtggagcaaattcaagatggtttagttcctgcccaacatgccacagtgagtctcaattcaaactgactttaactacaattataaccacagaggagcagtgagattcacggaactggaaggtctggactctaactgaggtggagttagcagctcaaacggcaaccccatggacttacctcatagtagcaaaatggctgccatagctcacacctcacatccccatgccaccaaacagagcagcacttttttctagaggtctagcaatgatcttcttgcatcctactaggtgtttttgtactattatgcccattcctgaaccagtcactgctgccaggggaatggggtgtaccacttggttcatggcaaggaagttagtccttggaggagtgggaaagagagaatgccagctcatccatcccgtggccgaatgtgacagagagaagctttctcacagagattcagacggaggaggaggcatggagcttgggcaactaaatggtgtccaaaatgtcaccgctccgaggttcttctagtagcagaggcactggccctcctgctcaggatacctgaagaggtgtcctggcctccctgagcaaggtggtttggagtctgcacatggtgacgaggttctgtcctctcattctcccatcacagagatatgactgtgttacatgggtcagcgagttctttggccactttctccaggagtccattcctgcctgttctcttctttttggtaatactgagtctcatctcagctaggaagtgacaatggacaccagcaaagccaaatgacatatccttccatgtggccactgtgtgtgcaggactgtgtccctcatcatgttagtggagaaaggggtggcacccaagaggaagggaaggtgggattccctgctcttgaggagaagctggcctgtctttgggaatggcccacacataaaagagagttgggaagccacagaaaaacagtggttagctcagggattgcgactcagggtgcagggcctgggatgtcctctcaagcacaagggaacagcctggtcatcttccttgcacctccttctccttcactgcctcttccccaggtagaaacaagatgcctgccccccaaacctacatttgtcctcactctgaaaggacacagaaggagataagactgcagggtcaggccgtgtgggcgcgtcggaggggttgggcatagggtgagcccaggcctctggcatgggctcccatttccctgtttcccaggagtgttccacagaaggtatcactgggaatctgccctcccagagattcccagaggtctggaggggacagcgtatcagcggttgtgtaaactgaggcatggagaggttggattgagttgtaaggctagaagtggcagagctggcatttgaacccacctctgtgtgacctcacgccttttaactccacctttgggccatgctgggagttgtgtaaatgcagcagaaggcagaatgcagctcaccagcaaactcggctgctggtaggacaggctgcagggaggtcagaggtcaccacttccctctctttgcttctcagtaggagtcatcccgacatcccttcagagaaaggagcagggaaggaggatagcccagcacttactcccttggtgatgtctgatgggacccccctgagccccacacttaggcttgaggtgaccccccagagctgtggttgtgaatatccccgagcccctgctcaaggtcacacttgttcccctagtgtctaagacagggaggaggaaaggggaagaggccctctgaggccccaggagcatgggctggcagacaggccagcacagcctgacttgggctgcccggctctccgcctgtgtgagcttgcccccgtctcagttccccagtcccttctgacactatgatgcttcatgagtgtcctttacatgctctagcccgcagctccgtgtggggagatggcctgcatgtgtggctggtgggagaaggggcctgcaggtagaagaacgttgctggcaccgccggtgctgccttgtgcatgagcttgcagacaccatccggaagtcagctctccacccccaccccttctccagaagaggagagactcccccatcagtagacaaagagaaagagaagaaggagatctctaatcctccggcctggtcagggcagtccatggggttgtaaattaggagggctagatgattgtctgggagggcctccagaggaggggtggctgagagttttgttgttgtgggcacagagggctggagcaagcagccactttgcactggacacatgcagcaggaagcttggggctggcacgaggccctggccccacctaagatgctcttggagaaagggcccaggactcagtagaggggctgagtctgctgtgatggatgggaggaggccagcaggttcttttcttgtgattttgtgtgtgtgagtgtgtgtgtgtgtgtgtgtgtgttgaatgtgtgttgtgcatgtggggatatggatatattggtgggtgtgcttgtgctgtcttggggtggtgatgctgtatgtatatctgcaagttaccttaatttttcaggtgtaggtagctgcgggtgcatgtatccctctgtgcctgtgtgtatgtgttggcgtgtgtgtcttgggctatggctgtcttggtatgagagaggatgtgcctgtgttgagtatgtgtattgatgtgtgcacaggtgacagtgacttgggatgtgaatgtcagtatctttgtggttattgggaagtgttaggatgtggcatttgggtgtgcaattatgttgctgtgttggcatgggatggggtgtgtgttgtgtggataaggatgtgtgtgttgtgatgggtgtatccatatgcatttgcctgtgttggaatgggatagggtgtgtgttgtgtggataaggatgtgtgtgttgggatgcatgtatccatatgcatttgcctgtgttggaatggaatggtgtgagtgttgtgtggataaggatgtgtgtgttgggatgggtgtatccatatgtatttgtctgtgttggcatgggatgggtgtgtgttgtgtggataaggatgtgtttgctgggatgggcgtatccgtatgcatttgcctgtgttggaatgggatggggtgtgtgttgtgtggataaggatgtgtgtgttgagatgcctgtatccgtacgcatttgcctgtgttggaatgggatggggtgtgtgttgtgtggataaggatgtgtgtgttgggatgcgtgtatctgtatgcatttgcctgtgttggcatggattgggggtgcatgtgtgttgcatatcatgatggcttattattacatagggtggatttgacctcccccaaggactatgaccttcaactttccttagaggagaggtatctgggttctgagactgtccttgcccctttttccaaaaccttcgctcatcactagaggggtcttccctccctaatgctggctcagcctcaggtggaagatctggcttttggggtgcaagttgggaaatgcagaaagccctgccttccagtatgcagctgtggcctctccagcctcaagcacctcctggaagaagctggggcttgaggctctggggtccccattcagggagcctctgttctggagctcagccagccttgtgcccggaggaggtccgtgagctccatgaggcaggggttgtgttttcttcagccgtctttccatcatgcttccctgcacggggcatagagcacagcagatgtcagggaatgtggtcaacttatacagaatgaaatgaaatgccttctctcagcacaaaaggcactttgcccagcagccaactgggatttagtccttcccaccgctcttcctgtaagaacctaaatttacagcacagggcctgccaccgtagacttttggtgggggttattgtgagctgggcaggttaccaggtgcatgagggagcgtgggggtttgagatggggtgcaggcatggtggtgtggctcggggatgaaacctcatggtgatgtgttctgtttgctgtcagcatcctcgggaccccctctcagggacagtggtgaccttggctccatgtccaacttctccctggatgattattctccttcacgagcctaagaggcggctctaggagtagctgttttctctcttgcctccctcctgttgaagttcaccaacagagtagctgcctcattcacttgtgcctgttggaagccaggggtacaaccttcaactgcggtcactgcctcttaggtctgcggagtgtttaaggcctaagccctgtggccagcacctgcaaagtgatcacatcgctgcttacgggtttagctgaccaagttctatggacacgatgaaggattaggggtgcaggcctggggcgatgggggtggaagtgagtctgactgagtttaccacaaggcagggatttcagaaaggcacccacacattctgcagccagctgggggtgtcgaccagagcctggggaccagacggcgctgggccctcgaggggtaaaggtcaatcagcttttcctgacctctgcatgcacataacataggaatctccctttcctgaaattccaacacatcttctcccagccatttcataaggtcagaaagaacaaatttcaagaataagaaggtagtgggttaggggagtcatgaattggatgaaaatcatgggatcatgattttcctggaaatcaccaagaccccaagtggcagctccgccagcttctgcttggaaatgtgtgcagccaggtgcattggggtcaatggtccttttttggttagtggttgatgacacgctgtcatctccaggaagtaggtcccatgggaagaatggcacatgggtccaggagactattcaggggagagagagcctgagcacaggagaaagggcagaacatgagtgcccaggagggagagggcaaagcggggtccatcagggtggggctcctcctcctgcccgagttccttaccaggaagcacaaggttctgtggaggcctagagggcccctttgatggctgtggctcttcggggaatttggatggaaagtggctggaacccccaagggatgcagcactctggagaacagggactgcctgatgagaactggggccgtcggggttgatgagagagcagtgatgtcagcccaggcaacagagtggtcattggaaccatattgtttccacgcttagaatcccccagtgacttcccattcatgaagtacggagttaaatctgtggcggacaaggccccatcacctcccactctccctggtctcactctgctgaggccctgccaccttgcctctattctcattccctgaagccagccctgtagtggcctcagcattgcctgctgctctctcaggcctgctctccccgcagaccatcctgttactggcttcatctcaccttcacctcaacgccacttcctctgggaggcctttccagggaccttagtaggaactatccctccccagtcaccccctgaagatgtttctctgtaggatttgcatctctgaggtgtttggagggcaccttgttcactcttcctggttttcttcttcactcattcattcattttctttcttgtgtatttgttgacttgcccctggtgtgagcgccaggagagcagggttggtcccttatcacatcgccagcacccacggcagtgcctggcacataatacagactcagtaaacacttttttaaaatgtgtggtaaaatacacgtaacaggttgggtgtggtggcttaggcctggaatcctggtgctttgggaggccaaggcaggaggatcacttgagcccaggactttaagaccagcctggccaacatggcaaaatatcatgtctataaaaattattttattttattttattattttattttatttttgagatggagtcttgctctgttgcccaggctggagtgcagtggtgcgatctcggctcactgcaagctccacctcccaggttcatgccattctcctgtctcagcctcccgagtagctgggactacaggcacccgccaccacacccagctaattttttatatttttattagagatggggtttcaccgcattagccaggatggtctcgatctcctgaccttgtgatccgaccacctcggcctcccaaaatgctgggattacaggcatgagccaccgtgcctggcaaagaattttttaaaaaattagctgggtctggtggtgggcacctatggtctcagctactcagaagggaggaggctgaggtgggaggatcattggagcccaggaggtagagactgcagtgagcaatgatcgttccactgcattccagcctgggcgacacaatgagaccctgtctaaaaaaaaaatacatataacatagaatttaccattttaggctggacaccatggctcacgtctgtaatcccagcactctgggagactgaagcaggaggatcacttgatcccaggagttcaagaccagctggggcaacaaagcgaaactccattgctgcaaaaaaaaaaaaacccaaaccaaaccaaaacaaaaatcagctgggtgtgatggtgcatgcctgtagttgtagctactcaggaggctgaggtaggaggattgcttgagcccaggaggttgaggctgcagtgagctgagatataccattgcactccagctttggtgacagagtgaaaccctgttagaaagaaagaaagaaagaaagaaagagagagagagagagagaaagaaaagagaacttaccattttaactgttttttttttgttttttgttttgagatggagttttgctctgttgtccagtctaagaaagaaaaagaaggaaaggaaggtaggaaggaaggaaggaaggagggagggagggaaggaagaaaggagggaaggaaggaaggaaggaaggaaggaaggaaggaaggaaggaaggaaggaaggaagggaaggaaacttaccattttaaccattttttttgttttttgttttgaggtggagttttgctcttgttgcctaggctagagtgcagtggcacgatctcggctcactgcaaactctgccttctggttttaagcgattctcttgcctcagcctcccaagtagctgggattacaggtgcccaccgccacacctggctaatttttgtatttttagtagaaatggagtttcaccatgttggccaggctggtctcgaactcctgacctcgtgatcctccgcctctgcctcccaaagtgctgggattacaggcatgagccactgcacccagccttaaccatttttaagagcacgatttgtggtatgagctacatgcacatggttatgttatcatcaataccacccatccatagaacccttctcctctggcaaaactgacactctgtacccattcaccacaactccccatttctctcgccccccagcacttggcaaccacccttctactttccatgtatggatttgagtactctaagtaccacatataagtagaatcacacagtaattgtccttccatgtctggcttattttgcttagcatggcctcctcaagattcattcatgttgcagcctgtgacagatttccttcctttttacggctgtatagtattctattgtatgcatatcccgaattttctttatccaattcatctgctgatggtgtgtccttttggctgtttcagtacacacttgaataaatgaatgacgacaaggagggtggatctctgcctcccttcccctgcacaagacaggagtggcagctttgaacccatgaaggccattcattcatggattgtatcctatgctactggctctccagaggccagcgggacctctttctgcagtaatgtgctgtgctatggggtctggaccttggccaagatactgagcatttctgagggagggttttggcgtcaggaatgggcctctgctcagaccttaagccactgggtagctactgtgtaccctgagggggtcacagccctttccacagcacctggagcagaggcaccctggtatagctccctctcctaaccctgcaaggcaagctgtgccacagccctggccgcacagcggcctgtgtgagcccagtgctctgccatccgggaaggaggtgagggaaggggagggtgtgaccccacagtgcctggagctcatgctgggagtgagtgagcacaaacaggcaccagcgccccgtgaaaaatgtgtcaccgcccacgacaagatacgctgcgtggtttctgtaggaaactgaaattccagaaaacaacccctgtggtccagtgtgttttactggaagttcagacctccccttcaagcttgccttgtgccttttagaaacagaatctctgtctcactccccaacccagcctaggttaatgctgagaccagggcaaagaggaggacttggcgataaggcttggggctgggaagatgctgtgattcactttgatgtcttggaggggcaggttgtgaggatggaatgaggaaggggaagaccccagctcgaacgccaagcttcggtgggcctggtgggctggccaagtgtcatagctgctgcctgcatggggtcctgtgtgccacgccaggcacagggcaggtgctggccaagtggatctcccccgccactctggcagttcataaactgggacctggggcgaggggtctgcattgagctgggaacacaaacctcaaggcccgacttgtccagatgtcacttggtggtatggactctgcaggggttcgtgagggctgtggggttcttgatggtggttgggagagctgggaaggcacggagcagcatggagggatggagatatggtcttgggggaagctggtatgctggacagaagcagcaaatgtcgtgagtgcagagtagagcagcgcttgggagggcctgggcaccgatgcccatcgacacctaggcagagatggtgtggaccctgagatcaacagggagaagaggcatggggagctttggctttgggggtgcaggtgcagagagggattccaggcaggagtgtgctcatcccattcccacctgagaatgtccagaggcgatgaggattgtcacacccaccccataaaggggggcccctccaggcctcctggggctttctcccttccctggcacctggaagacccagatacccatgacccagggccctgggggactgctgcagacccactccctgcagcaggatgtcccctgcaacatggtgctgttgaccaagccaagtctccaaacatagacataaaagaaaggaatgaccgggcacggtagctcacgcctgtaatcccagcactttgggaggccgaggcaggtggatcacgaggtcaggaggtcgagaccatcctggctaacatggtgaaaccccatctctactaaaagcacaaaaaattagccgggcgtggtggtgggcctgtagtcccagttactcaggaggctgaggcaggaggatggcatgaacccagaaggcggagcttgcagtgagccgagatcgtgccactgcactccagcctgggcaacagagtgagactccatctcaaaaaaaaagagaggaagaggaacatggcaggagtccccagcctgctgcaggctttatcacacctctgcttgcccattagttaccaggaaaaatcttcctcctcaaagggagagcattacaagccaatacacctggatccctattctatttctggggtgcccaacaacccttggctgatagaggcacattccccaaagggtatttggtagttctcaattaatggaatgaagccatgcacaggtgtacccattccacacctgggtattccacacctgggcaccctgctcctctggggacgctcagcctggcttacagctcccaccgcccacctgcctatgtccatcatgggtgtgataggagagggcacctcagagccagccagggatgccagaggtggatggtgcctgtcctggaatctcggtgcaggttgtagaggggatagagtgaagtcagcttcacccagactgtccccagcccacccccacatcttccccacatgctattcactgctagaaacataatatttagctgacggcaaggaagccagagaaatcagcagcaacagtggtctccagggggagagatgtaaccaaaaaacaaagtgtacgagttagagtcaattccagagcctgtggctgcttcaagctgccgtggacagcctcctcccaggtgagtcctgagggaggggtttggggaggaggctgtgcgattccagggggagcaggaggctttctgtctgccatcttccctatgatttttggcttgttggtactagtttctttagctacacccttttttgaggaagggaggcttagaataaatttctaatttttgaatagtgttagatttgcagaaaagttgcaagaagagtccaaatcttcttatactccatgcccagcttcccctgttgttaatatcactgtggtactaatatcacaacacatgaagcaatgttgatgttatcattaaccaaagcttatactttactcagatttccttagtttttacctaatgtcctttggtctaggatctcatccataataccacattacatttagtttttttttttttttaattaataaactttgttttttaagagaagtttcagatttacagaaacattgagtggaaagtacaaggggtggccatatgcctccgaccccacacctcccccactaatggacaacctgtgatagtttcttagactttccttgtttttgatgacctcaagacagtctttgaggagtcctggacgggtattttgtagactgtcttttttttttttttttttgagatggagtctcgctctatcgcccaggctggagtgcagtggtgtggtctcggctcactgcagcctccacctccctggttcaagcaattctcctgcctcagtctcctgagtagctgggattataggtgcatgccaccacgtccagctactctttttgtatttttagtagagatggggtttcaccatgttgtccaaactggtctcaaactcctgacctcagacaatctgcctgcctcagcttaccaaagtgctgggagtacaggcatgagccactgcgcccggccttttttttttttttttagagattgggtctcgctatgttgcccaggcttatctcaaacacctgggctcaagcaatcctcccacctcgtcctcccaaagtgctgggattacaggtgtacgccaccaggcctggcttagaccgtttatcagatgttcttctcatggttagactggagttatgggaggaagtttgtgaggaaggccagggagataaaggaccattctcatcacatcgtgtcctattaatctggcttatcactgataatgttgatcttggtcacctggctgaggtagtgtctgtcaggtttctacgcaggaaagccacagctgttttaaagataattaacaggcaggacaagctaaataatttatagagctcagtgcaaaatgcaaatgtggggcccactgttcagtcacaaagaatttcaaggcagaaatagaacattaaaccaaattcagggtgcttttaggcaggggctcctgggtgacgtgcacaggtcgcagtcccatgagactggtcttgtttgcagggcaattgtcagatcacccagatgcccctagagctctttctgcatggagagagaaggcctgtgccagctgtccttgatccctggacagttggaaggggcagatggctgaggaggatcctaggtacccatagccatgtgggcaaaacagtatcacgggcagaggatgtcatgaacatcacaggtgtctgcagaggccctgctgaggcacctgcctggtaacatgaaaaacttgaccggaggtctgcctggatagagagagaatggttgggtgtgtgcaggagccagtggttagtaacaaacagcagcaactctgtaatttttttttaaatgctacttttatttttaagtttttttaaaattattttcttctttttctcagtgctcaaagcagcattttttttttctggaacaccttagaatagcttatttaccaaatgctacatgagcctttatgctgggcaaaccgaggagctccattagagggggacacctggccttgaccgcccccatccctacagctttcttgttaggagaggagggcatcgcgctacctggtctcaggtgcatacctgcggaagcagagtcctcacgatagcagggagaagagtgtagggagaagagtgtacagctgccaaccggcttctccttgctattattcacccagctgtttagagaaggagagagtatttctaatcagctatatggcatggagttttatttgccttggtaagttaaaatgtacattattggtcagcatcttgcatgcaaattttgacattgcattccaggagtacctgcggaagagagtggcggcaggtcggatctgtgtaattacattgctttgtaggcttgtaacattgccatcactaacgatgcccggtatctcactgcgacggctgcctggggatattgccgtgagactcccgtagccagagaaagattatgtaaacatgtgtgatctcaaaagtgagtaatgaagttgagtacttgttgcaaaaattaataaatggctggtttacacgtgatggaggagtcccttgtgtgaaaactgagtcacccagtgtagtgatggataaacgcacttcgaggcacaggtgacttaaagaaattcatccttttctctactgatgtgatcaaatggacaattgcagtccacacctttcactccctacttgactaatatgaaatcatcacgaatatatctttctcctgctcttggcctgtcagaatcttaactcttgcttcaaaggatggcatgtcagctctatggggttacctgcagtttctggaatggtctatgttgtccaatgctgcaaggaagtgctccaaggtggccttggaccgatctgattctgccccctttctcacttgtagttctcaagaataagggtagaggccgggtgaggtggctcacacctgtaatcccagcaccttgggaagctgaggtgggcagatcacctgaggtcaggagttcgagaccagcctggccaacatggtgtaaaccgatctctactaagaatacaaaaaaaaaaaaaaaaaaattagccgggcgtggtggcacacacctatagttcctgctacttgggaggctaagccaggagaactgcttgaacccaggaggtggaggttgcagtgagccaagatcatgtcactgcactccagcctgggtgacagagtgagactccatctcataataataatagtaataataataataataatggtagaatgttctggggatataacatcttgagattagggggagctggccaaaacaccctggcctctgatacagttccccctagaaattagatatcctttggtgttttagcccagcgtgtcccatggccccagagtatgcaaccctgggggctgcttttccaagaccctcagttgtagtgcaagtggcttatacagacaagactacatccaccccaggaagctttcttgagccttaggggacccacttgcaataaatcttaggcttctgtccaccttgctgcctatctgtaagtaacaaatctgcttcacataacctgttgcatgtattctgtgtcattgaacttggacaggctggcacccatcctcacacatgcctccaggcctttacacatgcaatttgttcactcatatccttggagccgctacaatgtatcctgaagttattactcacctactaaatgtcctttgagtcacagctcaagtgccacctgctcagaggagacgtcccgcccatcctgtctggaaaattaaccccctgcccttctggcccatccttccttgatgatgcttacctttctgttttagctgtctctcctccagggatgaatgttcgtgaaatcaaactgaccagggtccagatctcagttccaccaggcaccagcttgtgtggccttcagcaagatactttctgaacctcaaatgtgctgtctgtacaatgggaaaacactagtttctagtttgtaaagctgttaggatgagatgatgtgcctggcccatagtagctgctcagtgaatatttgttccgacatggatgaaggaagtgagacttttgtgatgtctgactatttttagactggagaggaagagggaggcatatgggaaagaaggcatggcagagacaaaggtgaagcacattggtgagctaggtgtgtttagtggatgttgacgccatgtggttgggaatgtgctgggaaccctggaaaaggagactagggccagactgtggaaggccttggacgccaggcaaggatgacatcctgcaagctgggaccagctagaggctcataaaccctctttctctctctctctctctctgtgtgtgtgtgtgtgaaatgattagggggtttatagcatggctaccctgtgagcactgtgtagggctccatattgttatctgggtcttgttcctcacgttttccactccctcagacacccgcccttttccccacctcctccagcagacatttgtggacctcctgggtcccagacagcagtgtggccgggtcctgtgtgaactcccccaacccctccccatcactctgtcggggtgaaagcactgatgtgttgtcaagggaggatattacacgaagcccctgaagtggtacattaaagcagtttggattttctcttactgctaacattgattactattaattaaggttgatatttacaatcagagggagtacaggagcagatcattttttattaatcactattctggattcatcatcagtcatcattatcaaaatattcagacagtggacagtggctgagttttaaaactcaagtaaatgataaaattaaactacattagagagtatatgttctctgtgacctctgtctttcctagttttccctcttgtcccccaatggtctcagcctcctgctgtgcattctccccccacatcccccctttcctctctcctacctgtcccttcccttcctctctctctcctttcttccttttcttcactataaacagcactaccctataattctgcagtttgcttttttctttcaaccatgtggcttcaagataaccttatttttgcgttattgttgttgtttggttttttattttgagatcaagtcttgctctgtcacccaggctggagtgcagtggcacaatctcagctcactgcaaccttcgtctcccaggttcaagcgattctcctgcctcagcctcccgagtagctgggattacaggcatgcaccatcatgcccggataattttttgtagttttagtagagacagggtttgactcagatttctcttagccctgttcctgtccgtgtaacatagccactggtcatggtggctcacgtctataatcccagcactttgaaaagctgagagggaggattctttgagaccaggagttcaagaacaagcctggacaacatagtaagaccctatctctagcaaaaaaattaaaaaatataagaagaagtataacaggccataaaatagatatggcctggtattttgtatgtatttttagccattccccaattggcgggcatttaagttattccctcccctttcttcccactgctgccatagtcagtgccacagtaggcatcttgtctgtgtcttggagcaggcaggaaagcagtctctggggtaggcatgaagaaacgggggtacagccacagcccactgggctccccagccccttctccatgtccttcctggactctagccaaacccaaccccacacgagccccagacatggccccgtgtactggctctgctgtgctttaggaccagccgctcctggaatgcttgatgaggggtccccctttctcccctgtctccccatgttcagttcctgcccacatctaaaggtatggggaggtgcctgctcctccagggacttaaggttacctgctttctcctatgaagctcacccaggaacttgtcactgtagagtgaaatgcattggtagctttgttctgatgatttttgagccccatgaagacggcaacggagtcgaactcatttgtctctccccgggtcattacacatgactaccaagggctcgtcttctgaagaacaaatgcggctgttggttttcccacgtgttagtaagagagtgagtggttcttgacattcttcagccttttcctccctggggttagggctggggactggggcttctcccaccttcttccctctgtggccccagtcatcatccactccccagcgcacctgggacccctgaattcgctcttactgagctacatgaagacttttggccagccgtggtgttaatccgtggactctggccattagcatcctggcatttggaatgagaaaagtgaaatttaggggatcctggtcttccttttaggagtctttttttaagtaggtaaacaattgtaggtaatttaatttgtctgttaatggcgcacatggatttactaagagggaaatgtcactgggttgtggacacacactgcatataattcgatgagaatcggcctctgatgggcagcaataaatgtcaaactgttcaacattgattgttcgtgaaggaatattgcttaacaatgaataaaatacctttctgagtttcctctattggcctgactttaaaaggaaatagggagatggactccctctgtggctcacggccgcttaggcttggaggcagggaagctgctgggaaatagactgctgggcttctgttctcaaacaggtccattttagtggctcctcaagcccgcctcccagagcagagggatgaatgcttagaggccctagtggctccccatgtgatttgcgaacttctccggtctcactgggcctgcctgcctcttggactccagggcctgtggctctgtggcacccactactctcctgctctttctgtcactcctcagaatgctccagtgtggtcctgccttggggcctttgcacttcctatacttgctgggtttttttttttaatagagatggggtcttgctatgttgtccaggctgtactgaaactcctggcctcaaatgatccttctgccttggcctcccaaactactgggattacaggcatgagccatggtaactagcctatattttctttgttaaggtccacttgtctttacttttccctgaccacccatccaatgtcaaagctcatcttggttgtgcccttattctgtctgtcccgaatcatgacatcacccttatgtatttaactatttggtattcttttatttccattgtactgacacgttctccatctccccactagaatgcaggttctatgagggcaggaatggtgtctgttttgtccagttaggtagcccagggcctagagtagctcatgatacaggaatgatatacattcttcatgatattcatacacagcagtaagtactgatggacccagtgtgttgaatgaatttctgcggagtcgtatgacatgcatgcattttatgaaacagcaacctcccaagacatgaaaaaaatatgcttgaggtttctttcaaatgaatctccctttaagcagaaatttctgctttgtggcgtgaagaaagcagagtattccagcagtggttggttccttctactttttagacaacccagtaatttgtttggagtgttgttgggtcagggggttctcactgacaggggctgtgtctgtcccctctggaaactgaaatctcctccactgtgctttgctgaagacagcagtggctgggcacaatgatggcaaactcttgagcttatcagaagaataaaaggacttaagtgaagtggagatttcttggtagttatcaccttctagaataaaaagaaaacctgattctttccttcatctcaggggatcctctattgttataagtgacctcggtgagggaagagagttttcttactctacagaaataaaaatctgtctgctttctctagcactgaagaaaaatagtccttttttcctttttctttttagaaaagcaccttgcagcttctgatgattgaggacggggtgggatcctccattgcccaaccccttagctccaccactctgcagacctcggcgtccttgaaggagctcgggaacagagatcagcatgtgtgggtcaggctgctgatggctcacatttaagaaagatggttcatggataatccttggtgtttttttttttttttttccaggataaagttttatgtttgaccctgagaaccagatattaagaaatatatgctatgaagtcattttggctgatttaatctaaacttcctgtatgctcttaggcagaggtttcaaggttgggagggtcttacgatctaactctgccccacgcggggttgaggaatgctgtggggctccgccagcttctatttgtataagtccggggtagggggcttcctgctgtctcttgagggggcccattcagagcctgaggagctctgatcttagaaagcctttcagatggggggatcctagtgaagctcatgggttttgggctcagtcaggcatggtctgagtctcagctctgtacacataaactgctggatccccagccaagtctgatcccttatgtgtataccggggaataatagtacttaccttagatgactattgtgagaattaaatgatgattatcttccttctaaacaacagcagagcacatagcaggcactcagtaaatgctctctctctttttaatattgccctgaaatgtgcatggtcccaggattccttggggtcctgtaagtcgaactggattctcccaaggccaagggacaaaatgtggtatagcttcgagtcttgagccttgtctgcttttcttattctgtgcccatctgaaccaatgcacttagtgcacaggacctgctgggttgaccaacgatgcatcatctgtgtaggctcagaggggctccctctccttttggaaactcatccttccgaggccatttttgcctgtctggggaccacggattctctggttcccactgagttactcatcactgtccaatccctcaagtcctttctcagaggcctggtgaagccctgccctctccccagtcctgcattgccactctgggattgtgtatcccatatcagttaggacaacactgaccgctcttataaatacaccctaacatctcagtatcaagacaccacagtttacttttctctctctcatccggagctcaatcggtgttgggcacaagcagcttttatttagggaccaggccagtggaagcctcatcattttcagtatacagtttcctgggtcacccaggacattgagatccagctgtcaggaaaagagagcaccatgagaatggagcaagagactcttctaagaagtagcagccttcattttgtccaaattccaccggctgaaagtcagtcacgtggccccagctaaatcagataagcctggaaaatatctgcggttgggaaactgcttccagcaacgaccctaggtcgtggaaggagacaggaattgctagttggctgctgtttcgactacagaccagatgtggaaaaggtcaacaactgtttgtttaattgcatcactcattttccccttggcctggtgggtcagggtgctgtgagggattccttcattcaggggccctcacgcacaccccacttccccagcactggccacctgcgcttgttccattcatgcctgttgggtttttgtccctgtcactgataaaaagcagtccacgaggcagcctcgggacatgtgccctgccacatcccagggtgagagtccctcccttccttgtgacctcagcacttgtttctgtaccctttgggtatggctggttaaccagccactgatccacttctttgccttgcttcagtttcacatttctcttttttatctccgtggaaatcaaaatgccctgctgagatgcagacacctgatgtctaatgcaggtctcggtccccagccttcagggctggttccaagggagcccgcgctgggctctggggattgctgttcccccttctaggcttgcctcaacttttgtgaaaaagtaagacccatgctgaagtcagtctcaggatcgattgtccatgacaattagctttccctttctccacagttcctcagatatcacagcagcaggtttcagcactgctttcccaagctctcccggttccatggtgccaatttcacgggagtgtggagatgaggattctgctggagcagacatgttcttcctgacagtctttgtcatccatctcaggctcccgtgggtcaacaggtctctcttccttccccgggacctctccttgcagggcagacagaacaatcccttctcctcttctccttccccaacgtgatgtcattgcttcctgcaccaaactatagttcctttctcagtctgtttgttttgctctgaattgaacttttaaaaagggttttttaccatcattctcagcaaactaatacaggaacagaaaaccaaacaccggatgttctcactcataagtgggagttgaacaatgagaacacatggacacagggaggggaacatcacacaccggggcctgtcgtggggtagggggcaaggggagggagagcgttaggacaaatacctaatgcatgcagggcttaaaacctagatgacggattgataggtgcagcaaaccaccatggcacatgtatacctatgtaacaaacctgcacgttctgcacatgtatcccagaacttaaagtaaaataaaaataaataaataaataaataataaatggctttttagcctgggcacagtggctcatgcctgtaatcccaccactttgggaggccgaggcaggcagatcacctaaggtcagaagttcaagaccagcctggccaacatggcgaaacaccatctctaccaaaactacaaaaattagctgggcatggtggatgcggctgtaattccagatacttgggaggctgaggcaggagagtcgcccgggaggcggaggctgcagtgagccgagttcatgtcactggactccagcctgggcaacagagttagaccctgtctcaaaaaaaaaaaaaaaagggtgggttggggggctttttagctgcccttaatactatattttttctttccttggctttcattaaagataagatcatttcaagtcccagtcacttatgtctgaggttccctaagaacatgttccttcttgtttccatgttttattcaaatcatcaatcaattaatctattcacttaacacatctatgcatatgtgcatgtgtgtgtatacatgtacttgtatgtacatacatgcgcatgagtatgctagatgcccactatcgtcttttcaaatctcatctctctgggggagtcacactggtttttctggacccaggcttcttccctgtcactgggatctctctggttgcacagtcggcattatgacacgtttgagagcatcctcatctttttctgggtcatttgcttgaccagcctctcgtgtcctggaatcctacctctcttttctgcaagtattttgaaccctggtatgttaaaatttaggatacacattggttcgtgatgaattacaaacatttattgagtttttaaaaaatgccaggcagtgtgctaacttattaaatggatttaatccttgtaacaactttttagaattgagttctttttaaaaattttgttgattgatttattttcattttttatttctatagtttttggggaacgggtggcttttggtaacatgggtaagttgtttagtggtgatttctgaaattgtggtgcacccatcaccccagcagtgtacactgtatccaatatgtagtcttttatccctcacccctcccgccctcaccacctccccaaagtccatcgtatcattcttacacctttgcctcctcataacttagctcccactgataagtgacaatatacgatatttggttttccattcctgagttacttcccatagaataatggcctccaacttcatccaagttgttgcaaaagacatttgttccttttgatgactgagtagtattccatggtgtatatgtaccacattacctttatactttcgttgatcagtgggtacttaggttgattccatatctttgcaattgcaaattgtgctgctataaatgtgtgtgaatgtgtgtgtgtgtgtgtattgtgtgtctttttcatgtaatgacgtcttttcctttgggtagatatccagtattgggactgctaggtcgaatggtagatccactttcagttctttaaggaatcttctgttttccacagtggttgtactagttctcgtaacaggtaacagctttctgaggtagatactgattttatcctgcagtagaaaatggggatctgaggttctgaaatgttaagtaacttccccaatgtcacacaggaagtgctggagtctggatttgagccggtctgttttattccttctctgtgctcctaaccattgtcccatcactgtgaccccaacctacctagcctcacacacctaggattttgagaactctaagacaaacataattgtagttgtccaagattcttgcttttttttttctgccttaactaattcctccctattagttagaactaaatctagagttttaaaaatattccttcattatattctctacggtctggaaaatgaagttatcatcaagataggtcaaggtcttgtcagatgaatgaaaacaacagtaatgatgtattttcctccccattaggtctgatgcctcgctttccagccagctcaaagttctaatggacggtcagagtgaaatgttctatcagtcccttgtccagccccccagctggttgaattgggagttttgtgtttgcaggggaccctctatttccccatctgtctgggtgggcttcagcaagcttctagtatcagcatctccatagcgccctcctctgggtccaccccttgcttggtgctgtatgcttcttgctttgggcagacaggagcctggggacaccactccttcaccatttctgttaggtctggcctttggggtccagaagtcctggggacaggggtgccccatgttctgactcccatcctccaggctccagccccaccctcactgtgaggtttatttagtgttctgtgttggcccagtgcccacctcattggaactggtgacctccttgacaatttgttttctcctgtgcatctccaggctcctcccacactctcttctcctctctgggttgtacctgttgtacactgtgttcctagggtgccaggtcagtgagcaaggtggctccccttggcaggtcagctggcctcccggaaaacatggtcctctccccttctgggaaatgcatcagagtcccagctgggaccttttccaaggcctcaagtttccttcaggtgtcccattggcacctcaaactcagcaggtcccaaatgccgagtcttccgaatgggtgtctcctgccatgctgcctggcggggtgaacagaccccaccccaccccaccccaccccacccatccaacaaccagaacacccagggcatggtccaggcggttccttctcacaccccttggagacccctctttctgcttcttaaacaattcttgcgtttgtccccttgtctgtcacagatctgaatctccacatttgaggtcttcatgggtttccctcttaaacacagtttccgtctagttcgttcccggtagcttgctccaaaccctttcccccagatctctggaaggatctacctaaaagccaacctgatcatgtcacttctcagtttaaagcaacccatgggccttcagaaaaaggccacagtctcatgagaaccttcagggtccagcccttgcccacctctgcagctgtgcctcttggtccccacagtctttgttctggggtgggggtctgactcctgcaagtttccccaccctgtattccatcattcctctgggtctctgtgtgttcagctctctctactggaaatccccctctacctcaccatcccaattctttgccaggctgacttctgccttcctttggaagtcatccccctgaccccaagtctctgttaaacccagcccatccccgctggtgcaccctgccccatcgaatcacaggtgttctctctctcactccctcctacgcctgaccacctggacacactccatatactctgttgaatggatgaatgtatgtcccagaaattcaaattcatcagtgtggggtgttttctctcattttgatttttttttttttttttttgagatggagtctagctctgtcaccagactggagttcagtggtgtgatctcagctcactgcaacctctgcctcctaggttcaagtgattcttctgcctcagcctcccgagtagctgggattacaggcacccaccgtcatgcccagctttttttttttttttttttgtatttttagtagagacagggtttcaccatgttggccaggatggtctcaaactcctgacctcgtgatctgcccaccttggcctcccaaagtgttgggattacaggcgtgagccaccgcatgcagcctgattctttaatatatcaagtaagtgtttcgccccatccttgttctttctctgtgctcttagcccatctctgtgcaggacccatgagcttcttgtttcgtttctttgagcaagtagcgcactttcttttttcttcttcttcttcttcttctttttttttttttgtcttctcttgatcttttttggaaagactgtggaactccgtgtgagagctcttaaattttctgggactcaggaaagtggggggacaacatctcttctttgttataaggattaattactttgtaaagtgctataagctttgtagagtagaaaatcaaaccttgttgccgggcgcggtggctcacgcctgtaatcccagcactttgggaggccgaggagggtggatcaccaggtcaggaaatcaagaccatcctggctaacatggtgaaaccccgtctctactaaaaaatacaaaaaattagtcgggcgtggtggcaggcacctgtagtcccagctactcgggaggctgaggcaggagaatggtgtgaacccggaaggcagagctttcagtgagcagagatcgcgccactgcactccagcctgggcgacagtgtgagactctgtctcaaaaacataaataaataaataaataaatacataaatacataaataaaataaaataaaaaaaggaaatcagaccttgttaaggttccacccctgcacgtttccttcttcccatggtttccttcaagcctctagctatttttttggtaacagctttattgagatataattcacatatcatacagttaatgcaaagtgtagaattcaatggtttttagtctattcatagaattgtgcaaccatcaccacaatcaattttagaacatttctatcatcccagaaaagatactctgcaacctttagctagcaactcccagcccaagacaaccgcacatctctttcctgtcactatagatttactgattctggacgtctacttgctgttcttaaagctcatctctgtgcaggacccatgagcttcttgtttcatttccttgagcaagcagtggatctttttttcttctttttttttttgtcttttcttggccttttagcaaagactgtggaattccgtgtaaaggctcttaacttttcttgaactcaggaagcaggcggtggggtggggggaaacatcttttctttgttataaggattaattactgtgtttgtaaagtgctataagctttgtaaagtagaaaatcaaacttttgttgattttctaattgttccaaattaatgtcattttctcaggtttttttcttaatttgggatacctcattagcaaaaaatatcaaatttcagagaaagatgttctaagcctgcttttatcatatctccaacctggagaacccatagcaagggaagatgagctcagagaggctgtggaagttgctccgagaccagtaaaggtgtgtttcattaggtgggggttggcgtcactattatccatcaggaaagggagagggtgctcagtctgccagtgacacatgtattttctttctttttttttctttttaaaatttattttgtttaagttccgggatacatgtgcaggatgtgcaggtttgttacataggtaaacatgtgccatggtgctttgctgcacctatcaacctatcacctaggtattaagcccagcatgcattagctatttattctgatgctctccctcccaacctccccgctgacaagccccagtgtgtgttgttcccctccctgtgtccatgtgttcttatcgttcagctcccacttaaaagtgagaacatgcagtgtttggctttctgttcctgcattagtttgctaagggtaatggcatccagctccatccatgtccatgcaaagaacatgacctcattcctttttatggctgcatagtattccatggtatacatgtaccacattttctttatccagtctatcattgatgggcatttaggttgattccatgtctttgctattgtgaatagtgctgcagtgaacatacatgtgcatgtatctttataatagaatgatttatattcctttgggtatatacctagtaatgagattgctgggtcaaatggtacttctggttctaggtctttgaggattctccacactgacttcctcaatgggtggactaattgacattcccaccaatggtgtaaaaacgttcctatttctccacagccttgacagcatctgttgtttcttaacttcttacatgtattttctataataactcatctcatctgtttttggcctacttggacttggtcctagtactccacaaacatttccttggctcagataaagggcaaatgctgataattcacctaaggagggaataaaactactaagtagaaggaacacagttcatctgctctagtatttaaaaattacaaacttaaataaagaaccagtggccattttggtctattgaatgataacaaatattaaaaactgaaactcctgcctgccagggatacagggagccaggacttccaacaatgctggtagccttctaagtggttgaaagatctgtagaagacaatttgtcaatacccatcaggagtaatgacacgttaaactcgttgacccagtaattctgcttctgagaatctattttaagaaatttatccaaagtatgaaaaaagttacctgcgtggaaatgttcattataacatcgtttaaaatgccaaaaattaaaacaggaattgtgttaaaatgtatggcactggggcattccatggagacagagctccttgatggacatgatgcagccatttacaatgatggttttcaggagtgtgcacaagaacaaaagaaggaaacacaactgaatgtggaccaggggccgggccatgtgaaaagctgtgcacagtaaagcaatgggagggagaaatgccaaaataattactgcaggggctttaaggcatagaactgatgccttctcagtctctctctctttctctctctctccctccattcctccctctttctttttcttttgtccatatgttttatgatgtatgacattacttccataaaattttttaagaaaattagaaaactcaaccccctggtgcatgttaagaaggtcaaacttactgttttgttcttcaaaaacctgaagtcctgaagtgaggaccaaagagatagtagtaaactagcataatgatcacattccctggcattctatagaaaatgacaatttcccccattccctgaaacaaatcttgactaactttgatagttcagcaattagaactttggcatacaatctttcttcttcaactcctataattagtggtctccaattatatgaatcaatttcaatttctataaatcagatgatttagagagaaggctgttcaatttccttttcaactgtatggtttcagcagcaataaaactctcagcttaaaatatcaggatgcaacttgctccagaaatattacccagctcatttagggcttctgccggccgccacagcagttcccaggtttctaggtggtaccacttatctgtctgctcctgagccctgttcaattcttcttcatgggatctgacatctacttacagatttccctcccagtgtgggatgactatccctagaccttcctggtgttctaacagaaagacccagtttggacccagatgtatctctctaatgctagttagcaggcacttttagtgtctccctttttttcagtcctgggtttttcaatgtcagtggccctctaaggtgttctgcaggatgtgaaacctccagcctgaatctcctctaagcctggcttcgggaagtgcccgttgcaccctgctactttgtgaggactcttcatgaatcaattcctgactcattcccggaatctggagttgtggtttctttttctcctttagtcctttaatgtctgaaatgtgatttctttcatctcacaaggagcaagtcttattattaattttaaaaattcaaaaaggaaaattatttagctatttttttaattaaaaaaaaaaaacaaccctgagagtctcaacagactcttctgagcatcgaatcacatagacactttcatgtggcattaactcttccccattcgctaaaaggaaagcaagccaggggcagagggcgggttgaggggtcagctggaggaatctgtgccgaagagagttctgggttgcaaatgcacagcctccctcccctttcttctccccttggaggagataagtggccaaggcttcagtttgatgctaatgtggtttttagcaagatgtctgcttttggttgaagattggcctatggcttttatagtattcttaaattcagcttatgttgaattattattgttcctcattttgtgcatgacttccagttcccgaagcattagagtctctttaagtgctagggctgctgactgaggtttcttgacaaatagatcatggaaaatcaggacgttatatactggcctgcccaaggtatctgcaagaccagcccccttgtggaatcactggggcagagaacccacagctcaagctctcttttgatacctggggctctaaagaaatgtgtcagcaagtcttccaaacccaaaggggacaaggcttatctttcctggggagctcaattcaacagggaacagaaaacaaaagacagaaaccagccatttgtgacttgtttatttgattgtagccattaacaatcatgcattgaagaataacagtttcaaaacatactcacaagctgaggtgtggtgctcaggcttgcagtcccaacactttgggaggccgaggagggaggattccttgagaccaggagttcaataccagcctgggtaacatagcaagaccccatctctacaaaaaatttttaaaaattagcgaggtgtggtggtgcatgtatgtagtaccagctgctagggaaggtgaggtgggaggatcgcttgagcccgggaggtccagaatgcagtgagctatgattgtgccactgcactccagcctgggcaacagagtgagactcggtctctaaaaatgaaagtaaaaataaggaaaataaaataataaaaacgtacaatataatgttgagaaaaaataaaatataaaactgtatgtaacttgttttgtttatattcgaataatactttaatcagatttaaataaatatgattagaaagaagtctataaaagtgatactgacagtcgtcgtcaggtagtagaatctgaagttattttcatttcttttcatacctttccatatgttccagatttctgcaaatacaaacatggaatactttgctgaatagaatgtgaaagtttgctgaaaaggctgaagaagtaaaacaaattctgaatttccaatatggtacttggtcatagattgctctgacctgatttgcaagttctcaaagggtgcacactctgttcttgtctgagtcctaccagggccaagcatgtgcttcaaacctacatgcttccattgagatcctcctatgtacctaatgcatatttcaattgagtttggttttggaggatctgacttagtccaagttcatgtgaacctgcagagaaaagtgcacatgattggaggataaaagccattgctaacttttttttttaaccaagttgaccagttgttagaccagaaaacagttttgttgttgaataaacataatctcttcgttcatctcttcttgataagccctagaatggtgagatgactccctgtggctagcaatagaagatcctattaggcaagttttcttcaatcaggatgaaagagtcatacatattcaaaatgaacattttagaatatatagaccctttcatctccaggagggggttgtgtatccttgtttagatcttcattttacagatgagaacacaggggtctgaggaggaaaggggccagctcacatcccttgctgaactggcagtggatacagaatgtgaaccactgagtttttagggtcactgtaggctcccccttgccacagagataacagcgttcaccacttagataaagaaacttccatgctggccagcagtgggcattttcttccttctcccactcactcttcctgtaagcagaaataaggccctattgttatccaaagggcactctctcctaagtatgtcctagggcaccccaagatgatgatgttgtttgctagggtccactaccaggaaatgtcaagtattcgggattgcccacgaaagagtttattttggtataagaaaagatgggcttttaaaacttaaagtgaaaactttgggtttggaagggaaaatgtaaaagttggttataatgaggactttgtttgccaggcgccccagcccggtgactaatggctggctgcttgttggagaaagctgtctttaggggcgttgagggtgttagcaatgaacaggagtgggcaggcactgaggacccgggacccaggttaggaggcgggggaaggtggggtgaatgtgcaactccaatgagaaagtatttaactatggctccagtgtctaccaaggcctgtccaaggaccttggttgatgtcgctagagacaatgttgcctatcttcatgaaaacaaacggcaagtcctatcctgactcaaggagcagggtgttttggataattacaattttactccccataaactcctttaaaatggcatctaagagaagcgactttcagaaagaaaagaattctggggacattgttcctttcacagcacaaggtgaacaaaataagacagaaggccttctgtctcctgttcagtaaatttttctgggttaagattgttcttccaagtttgtcttcctggagtgcgtgagcctctgcagccaatgacaccacagtgtgtgttgtggggagttccagagtccctctccagttatcaggtcgatacatgtacctggtaatacaatgccaatccatggctaaaaatagcttccttttgttgcgatctcccagaacaaagggatcagacccacttcatctgtgtcccctgccctcccctcccggcagtcctaaggcaaacagtttgtcttttccctcaaatggatttttcatttaaaaatgggggagaatgaaacctgaatagcatggagacctgtgcactaacaaaaaattcttttgaaataataggtgctagaaatcacaatttcagcctcctgtgtcccccaagccagtttgggttgaaccagatgccaggacttaagtcaaatgtgtggggactcctctgtgggtcccttgggggaaactcaatgatttcttttcctttccttttcttttttttttttaagtgttcctcaaagatatacaagacgttactcctgataaaatcccgttagccatagttcaactttatattccttgatcagtcttgtgttttctcactgacttttgctacagtttatggctctagattaagtaccagaacacagagttttattttcctttgtctaagtctatcttcctttgcctggctcactaactggatatatgtacataggcgatgggcacagaatgtgggttgtattttgggtgagggtgggggtgggcaggtcggatcatgaagggacacagaatattaattagacagaaagtgctctctgtgccttatctgcataaagaaagataaagcccatgtaaataatatgtgtgtttcccataatgaatgtcccctttctctccatttctgcatagtattagaaattgcgtttttattatatgagacattggatgcatgccaacaagtttttcttttaacttgatattttgggctctgatctttgttagcactacaatggcatgtatctcgtacagtcagaggtcatttctatagctccttcccccttcccatcatttctggggaatgtttgttttcaaaacaaagaattgggttaaagctgaggtatcatatatcagaacatatttcaagacaaaattaagaacactcaaaccttcctttgaaaggtcagatagtatttattattattataaaaatgatctgtgatttatgaatttaacttctcataaaccttctttgtaacagaatatgcagtcagaggcttaacattacattgttttcttttgacaacgtatccacgagaccactgcagctgttcctgtactcacaatagcagattaattaacacaatcatatgctgttggctcttactcaatgagtgggtctgcagcgggatagataggtaaatcctttaaatgcggtggagataaagcatatactatggtagtttcataactagccagttttgcttctgactagccagccctatcaggaccaggttcacagaccacagacgccctgagcttgaatttcaaagtcagccacacctatcgccaacgccataatgcccaacatttgcaagacacaaatatgtaaaagccgaagacctctcggaaatcagcagctttggttaaaatagcagtcagtctgccgccagcattttgagtctgcagtatttttttaaagttcaatcattgctttccttaaatatctctcttgcaatattactcactttttttttttttttttttttttttttgcccatccctcagtgcacatagttctgggcagctgtcatgactttagtttttttaagtactaaaatatttttttttcttctgtaactgtgctaatgaaaacgtgtgtaatgaaaccttcctcccctgcccagtcaccagccatatttattggcaactttagctgacattttagggaacgtcaaacctttgttagagaaaatgtaaggctttgctttagaaacaggcatgcccatgcagagaacgaggtaacaaggcagtaggcttaatagaatttccttcagactttttttctaatgtccattacatatgcaacactaatttactttttgttgttttacttagcacagaaattgaaaatgtgacaagctttgctggattaaaaggctcatttcatagacacatagaccaagagaaagaagaaaaacaaatccataatttggaaccgtttagggcatccaggtagtagaaattcagtcttccccatcactcggggcatttgtcgtgggcctgagatttctctggaactgtctctgtcctttagaagtagataaaagtttggccatgtttggtcacagaagtcttgagtgctttggggaaaaaaatcgtatcatgatgttgaggtctctcacgttccacttaggggctgttcctcagcaccaggtcctggataagaggttcctgcgggggccagaaaattctagctagtgagcatcagggagatacggtgtgtaaagcatctctgttatgggttgagctcaagttttctagggtgctcctcatacgtggagtgtttgcaactcttccgagaagcacagagagcaatggctgcacagatacaaggcagcagggtggctactaaaataacaacaatagttaaaatattaatagcaacctgacctttcttctcaaccctgcccctgtttgcccatccctctcattcagctattttactaaaataataataaaacttccttaaaaaaaggttcagaacatgtgaataattagttatatgtagaaacattgcttagaaaaacctgaatacttgattctgagatcagaacagaattgacttggaaatctgcacagacagacaaggcagacagagacaaggtagggggaccgtaggcccctgggatgagaagttatgactggttcgttacagctaaggtcagtgtcccgacaagtggacactttgcactacgggaacagctattgccagaagcactgggctccttgcaaagttgcaggcgtcttgcttcgacttcactccgccattccttttacaacttgcattttgaaggcacctggtaaggctgggatgaatctgctgtctgaagggtgcgacaatggacttaaccagacttccaatgtgcaggcagtggcgatgcttctgacccagctcacgtggactttgggctcagtttctagtactgggtcagctctatgggtgccccatcctgtcatccctccttccttccatctaacctatggctcaagaacaggacccaaggacattgctccaaattaatgtccggggcctttttgagggtatttcagaacttaagaccctgtaatctcagcactttgggaggctaaggtgggcagatcacttaaggtcaggagttcaagaacagcctggccaacatggtgaaaacccatctctactaaaaatacaaaaatcagccgggggtggtggcgtgcacctataatcccagctgcttgggaggctgaggcaggagaattgcctgaacctgggaggtggaggttgcattgagccaagatcataccactacactccagcctgggcaacagagtgagactccgtctcaaaaaagaaaaaaaaaaaaaaaaaagccccctcagctgttctctatgaagcacatcagattggtctttgtgaatatttccaagattacacattatggccaaaagcctaactgtgagttaggctaagagtcagcagacccaggtcttggcttcactattgctgtggtattgggacaccaagtaaaccttgtaaacactacctttcacatagtacattacttaactggccttacccatttgtgatgcctcctcatagaaagatgtgagaatgcagtgagatgttggctataaggtataggctgagctgcgtgagaccctgcaagtgaagactccagtgccagagcaaaggacaggctaaggtccaggaagaaaaggaagtcttgtgtgcttgtggtgtctctgagcttgcagcagtatctggtactaagtcagcagttaataaatatttgttgaataaatgaatgaacagacaagtgtaggatccttatgctgttctaggaaaggaaaatggggaaggagacctggaaggaggctaagtcagcctctgaacaagcagaggcatgctggtgtttcgaacagagagaaagttgtctacagaatcatagaatcatctgatggagagatagcaggcaaatacaacctcttatacacatggagcgtaggcccacagggcagaagggatttgtccaaggttgcacatccaagacagaacttgggaccagtttaccaactcagtctcagcccagctgttctttatgggggtatctgaagaaaatccttttagccccaagtgtgcagtcaggctgggattcagtgtcaggcagtggttggggtcatggcaaagcaggaagggtgtgactcagagaagaaagacacaacgcagggaaagtcacagcaagagactccagtagaggccggggagggagtccagactttgtagcggatggtttcagtaatgggcagtggatcttatctttgtcagggtagtcaaaagcatcaggattcagttgcaatgataattttgtttcttgcttgtactgcaacagcctccataatgatgccagggtgtattcagtgcctggcacatagtaggtactttacagatatttgttggatgaatgtcttgaaggaatgtccactctccgggcgttcctggggaatctggtctccaggtgtaaggagggcttgagacttgggttgccttttccactgctcctggctctctgtccccataccctgtaccatgcaatgatcctgggccatcctggaagtagctcagtccctacaaactttctgttctgtctctggaataccctctgagttctcgacttgtcaaacttccacccatctcttaacactcagccggattgccagctcttccaggaagctttccttattgaatcagtctccacaagcagacattgtcacttctggggatgccatggtcctttgaaatgttgttttaaggctcttagtgtctcctgcctggggacaaaggagggcatatctaatgatccttctacttgtttgtcctgtcccatgccagagcactgagcagtgagctgagatttaatgagtatcagcagagggaactgcacaaagtaggtctgcagtgaaagtctgttaactgaaggaacaaatgtcttattgcattgctgtcggaattacatatggggaaaggcagcagaggcagttgggggaaggaaatgacattccggaggtaaagcagtagtagagatgggggggtttgggcagcacctgggccttctcaatgcactggatgctcaaggtctccagggatacaggtgagagtgatggtccggggttggcctcgagtagatgctttttatggtgagctagtcgagtaggtgctttttttaatgataagctaggtccacacagctacgaggggcgaggggcactgtgccactattctgtgtaacgtggtgctggcatggcatccttctgtaatagggcacaggtgacagtgtcctgcccccatgcacagcctcagctccagagaaaggggctgggagccctctgggggagcttggctcagcagtgtgatgctctttacaagagagatgattatgggccaaacagcaaggtgctcctccccctctactttgctctccttaaatgccagaggagcgtctgcaggtgctgacacacataccgagagacactggcggccacaatgcccatcggctgtgggtgtgcccctgggtgtgtgtatttaagggccccgtgagcggcttgagtcatcaatgatgctcttgaatggcaaattggtcagagttccacaatggtaatgatcactctgccggtgacctttctagtgcatttacattttatcacaacatgcacaagccacctataggcttcccattggctgggtcattcctcatgcacaataacccagcatgcagggacgcatccagtgtagatgagaaaggggtagcttctgacacatctcactctattgttgcatggtaatctttagcaccaaaggagacctttgagttaagcccatgttttcttcccttttatttttattttaaaaagtgaaggcactccaatgtgacatgcatccctcatgttaacagagccataaagatgaagcattggactcattgctgctcccacacatgtatggaactaaacccacctgagtggcccaaaaggagaaagcaagggggtgccccagggaagtccccggatcctgaattcttcggaactgttgtactttaagatattactttccaaaaagagatcaccttcatgtgtgtgtgaaagactgtgtgagtgtgtttgggtgtgggaacatgagtgtgtgaacgtggggtgtgtgtgtgtgtacattctcacgcttgtcatgcagaaattcagcctgtaagacccaagcaggaccagattccagagacaccctcagaagcctcacttcctgaagtttcagccctgtccccatcagccatatgtaatcaattagccatgtacctccatttgctcatttactcatgaattttgcatcactggagaaatcgcagtcctcttcagcttatagaaaattattaagacagtgtggtgattcctcaaagatctagaaccagaaataccatttgacccagcaatccctttactgggtatatacccaaaggaatataaatcattctatcataaagatacatgtatgtgtatgttcattgcattactattcacaatagcaaagacatggaatcaacacaaatgaccgttaatgatagactgtataaagaaaatgtggcacatatacagcatggaatactatgcagccataaaaaggaaggagattatgttctttgcagggacatggatggagctggaagccattatcctcagcaaactaatgcaggaacagaaaaccaaacaccgcatgttctcacttataagtgggagctgaacagtgagaacacatggacacagggaggggaacaacacacactggggcctgtcagggagtggggtggggggacggagagcattaggaaaaatagctaatgaatactgggcttaatacctaggtgatgggttaacaggtgcagcaaaccaccatggcacatgtttgcctatgtaacaaacctgcacatcctgcacatgtacccccagaattaaaaattaaaaataaaaaaaagtttcaaataaaagtcatagaaacgtcaaaaaatagaaaaaatataactgctgaagacagagaggaatgcattaaataagaggcggagtggctgtcacatccagggctctgggactctcacttggtccttgttgtctgggtgaggtgactgcgtggggacccatttcacagtgggggacaggagctcagggcttttgggtcagtcactcctaggtctgaggctgcagtcctccgggcactctaccgggggcgcaagtaggcagcgagcatgcagcgaggagccgaggagccgttccagcccgtgcgatcctgttcagctgaatcgtcactgctgtttccatttgagcctttaggtgacagtgccaagaataaaaataagcccggctattttcactcttatttggtacttctttttcttctttttttttttttcaaatgccattgaaatagaattctaatttttacttaaaatatgtcatcttaataaattgctacattattgcaagttgcttgatatatttaaagaccacctctttttccagaagagctcatttccaataatataatcacaatcaatagaaaaacattatgtttctatatacagtatctgctcttttttgagggcctatctgttcagataaaagaagtatttatctatttatgtatgtatctatctttgcatctatgtatctatgtgtgtaagtatgaatgtacatatgtatctatgtatgtatctatgtatctgtgtttgtatgaatgtatgtatatgtctatgtatgtatgtatgtatctatctgtgtttgtgtgaacgtatgtcggtatgtatcttctgtgtttgtatctatgtatctgtgtatgtaggtatctatatgtatatctacctatgtatctgtctatgtatccatatagctatctatatttatatgtatatgtgtgtggactcctaggatgtcataattttaaaataatatgactttatattttatcttcaaacatccaaattgtagactttgcatcaaacgtatttacacatgaagtgtcttaatacgtttcaaaataagtttcgtgtgattaccttcttttcctacagcagttgtctggacttctccagacatctgtcctctgttgttagcactccttaacctcaaggccaggaggagaaaggtcttggtgactcatattcctcttagccttggttaactcttatccagcaagggcttggtggaagtccatgttctggtggctgcatgggtcaggggcaagggagggatggtggcagatgaggacgaaatgaagtgttcctccccttggagatgtgtgcaagtctaagtgtgtggccccaccccactcccccacctaccagggacttttaggatccaaagccaagatagcattccctccagaagtactcccaagctcacctttatgccagctctttttaccaaagagggtaattttttctaaataatttcttagattattttaaatcgttcttctgggaacaggtgttttcttgggatgggcttgagttccaactgacatagaaggttcaggagaagctgcttctaatcccagggtaccccagattctagaatttcaccaagatgcagtggatggacttgggtctcacaatcccagtctcactcctggttctagaatctcagcaggatgccatgggatgaatgtgggtctcacaaccctgggctcactcctgtgtctagaatctcagcaagatgcaatggatggatttgagttgcataacttcaggctcactcctggttctagaatctcagcaggatgcagtgggatgggtgtgggtctcacaaccccgggctcattcctgggtctagaatctcagcaagatgcagtggatggacttgagttgcataaccccaggctcactcctggttctagactctcagcagcatgctgtgggatgaatgtgggtctcacacaaccccaggcttgctcctggttctagactctcagcagcatgctgtgggatgaatgtgggtctcacacaaccccaggcttgctcctggttctagaatctcagcaggaggctgtgggatgaatgtgggtctcacaaccccaggcttgctcctggttctagaatctcagcaggatgatgtgggatggacatgagtcttgcaagccaaggcttctcttggtctttaaatctcagtgaaatacagtgggattggtgtcagaggcaagggccacgagttcttatcccagcagtgctacctcctggctttctcattcagacccatgctttcttcgtcagtacaataggagtgtaccaagctctcttccaggctccctgtcagctcagagctttgttgaggctccttctggtgctgtttgggcattgttcaggattggagcgagaaggtttgacctgtcatgtagagtttcagctttcttaccctgggtacagagtctcaaacctacaaagtgggtatcaggggctgattactttatgaaaaggctcccatctacccccacaccctactaatgggattaaccattgaatactaaataagaaggaccaccactgcccatatttactaaaagctcaatatcatcatgctaagttctgttcttgtcttgtctcatgccctccatgagaacatccctcagtttcaagcatgacttctcattcctggttcatggaaaaggaagccaaggtttggagaagttaaaacttcaggtcacttgcttgcagtggtggatactggattcaacccagcattgtctgacatcatagctcatgctctgaaccactacacaagctgtacagaatggaaaatgttggctgttaagtccctatgtgttgggaacctggtttcctagcttttctggcatggtgggttgcatttcacttgtttttatgctggtctcccagcataaatttgacctcctttcatgggcctagaccctgtttccttcattggctgagcagtcaggagctcatctggtgaaagtaaagtgttcgcagatcttgcttcataaagaccagtccatactgagactcacacacctctgaaatgttcacgtaggtcagtggggaaatagaatttggattgcaataattatttatcttgcacagagctcatgaggaccacacaatggcagggcatgaggcacatcctatttgatctcaggtccttaacccattcatgcctgaggttgcaattttttgaatttttgcaatcagaccttggcgatgaccttgagcagtaggatacaaataactcccacatgcttagcattccaataatggaacactaggcataaatgggctaagggaggtagctcaagtgctgggatccccagggatatagctccaggggagacactttgggatactgagtattctggcagggaaacaaggtgagggaaagcaaattctaaaagggttgaatttactcagtaagtaatgtagactatgatatttcagcccatggacgaagttgacatacccatatctttgcctgaacgacccatctggtcaaatgccagggaaggaacatcagtcctaggtgttatgtctactccagggagaacagagcctctttacatgggcacttacagattaaatgggaatggaactgcatgttgaattgcctgtcttgagtctattagacctagcttttctggactacattgtaacatgcatctgcaaactctggaacaagggtagggctggctggcagtgtgggtgggaatggttttttttagctagctagcaccaggggcagtggagtagatatttttaaacttggggtgggattgaggtgaccaggggaagaggccctggaaatggtgagtgatcggaaagatcgaactgtgtatgtccaggacaagtccactgaggggagagagagggcagctgtggctggagactctggggagcagccagggggctaatgggagggcgttaccctaagtaggggacttatcatcgtctcatcaacctggacatttaagcaaagtagccatcagggacccacatcttctcaagatattttattttcttaagaaaaaggacaaaagtcctgagatgcctctattgcccctccagcaaactaaaagagcataagctgtccgcagagttctgtgttgaagggtgtcacacagcaagggagtaggggacaccagtgagatgtccctgagccacgggaaagagcttggggacactgctgccccctgtcccatttaaagttggatttctacctcactcttgaggccaaaataaaccccagatgtggcaaggagttaaatgcaaaacacaaaataaacagaaacacagggagacctaaaagaaaatagaagtatttttataattatggggaagggataccctctccaaccataacatctgagccagaaattctaagagtaaaggttgacaggttttacctttattcattttacttcttcatttaacacagtactggcaaattatgctactcaataaatatttgttgaatgaatttgactgcataaaaattaaatatttctaagcagcatgtgtgtatgcacacacacacacacacacacacactcccaaacctaaccataacatgcaaaatacagtatgacaacaaatgtttgctaaatacatgatagatgaagggttaatattcctggtgcaaagaaaaacaaagcctttacaaatcaataagaaaaagacaaatcctccaatagaaaaatggtcaaaggacatgagcaggcgattcagagaagaagaaatacaaatggtcaataatcaaagaacagtaatggaaatctttgcagccattaaatgtgtgagactgacctgtatttactgacttggaaaaatgcccatgacatattgttgaatgaaagaagtgggctacaaaacagcaggtagagtatgatttcatttacggaaaattatgtgagagtatcttagtctacatcttttgtgcaaaaatagaaacattctcaaagttgcttaagcaaaaaagagaatttgaggaagataagagtgcctcatcatccccttgcaaagtcagcagacatgtggcatcacccttgggtgggctggggtcaagccctcgtgggagtccctgggcagccaggcagccatttctccatcccctatctccctggcgccagagcatctcaaaactctttgcctccctctatttttctgattcctttttcccctctttgcaggccacctgggtagtgggattttgggtaatttttattcatttagaaatatatttctgtatggtttggggtttgtctttctttctttctttcttctctctctttttttttaatgaacgcgttatttttaaatttggaaaaagtctatatttttatttttaaagataaaagaaactccagttgggaagtgtaactgataaggagttaatatccttagcatagagaattttaacaaatcaataaagaaaataataccacaagcaaaaggaaaaatatggccacttaggagctcttatttagtgagtgtttactaagtgtggagaactacaaaactttgtacacacattctctcttcaacagctttaagaggtagatactattcttccctcccttccttcccttcttctttcccttccttccttccttcttgcctgcctgcctttcctccctccctccctctatccctccctccctccttccttccttcctccctcccaccagcctccttccctattttccttccttccttcctacttccttctcccattccctctctcctttcctctcctccttcctctctccctccttctctcctccctctttccttccttccttccttccttcctcccttcctttctcccttcctccctcccatcctctctcccttcctccctcccaccttccctcccttcctccctcctcctgcccccctctgacccactcatcctcccacccttcctccttccctctctcccacccttcctccttccctctctccaactcttcctctctcccacccttcctccctcccaccctctctctggccctctcactctcctgccctgtctcccttctttccattcttcctcccatgagtacccacccactgagcatctgcttcttgtcaggtatgttctgggctcctcggattcaggctgctgccctcatggggtttgcatgcctactctccccattttacagcaaggaagcctgagacctaaagaagctgtgacctggggcgccatttccgatgaggatgttatatgatccgcaaaataagaacacacagtttccagagaaagaaaaacaaatggcccatatgcagatgaaaatattttaacctgactagtaatcaaagaaaaaattcaaaagttgttttggtttactgatagattgatttgctcctccaacccaacaacttatgagattgataacaatgagtattgtatataaggttgggagaaaccagacactcttagtccgcccagtagctgtttatatttatacaaagttgaagagtaatttgggaaacatgtcaaaagccccccaaataagtgtctgcccattgtttcagcaattccctttttatgaaattattctctctatatattatattattatgagatatgttaatatttaatatatttattaatatataatacattacatattatatactaataaatattctataaatatatgttataaattttaatgaatattattataatatatattttatgataataaatatatattataatgatatatgaatgtatactatatatatggtataagatatattaagatatgaaatatcttatatagttatattatctcataccttatataataagatgtatcatcaataatctatattattaatctatatataatatatctaatgtatattagatagccaaagatgtttgaccaaggatattcactgagactcagtttataaagaaaacatttggaaacaatttaaatgtacttcagaaaagaatctgttgaggaaactatgactcctttactgtggaagtctgtagtttttgaaaacgatagcataagtctgtatgtttttgacatagagtcttactttgtcactcatgctggagtgcagtggcatgatctcggctcactgcaacctctgcctccctggttcaagtgattctcctgcctcagcctcccgactagctgggattacagacatgcgccaacgcacccggctaatttttgtatttttagtagagatggggttttgccacgttggtcaggctggtctcaaacccttgacctgaggtgatctgccctcctcaacctcccaaagtgctgggagtacaggtgtgagccaccatgctcagccaagattcccaatttttaatctcttcatctgttgattttttttagaaaattttctttaattttgttactttatctttataaataatataaatattatttatataatgaaatacaaatattcctatttacagcagcaggtagagtatgatttcatttatggaaaatgaatatggaattatggaatataaatattcctatttatatttcatgatgtattttccttgtttgtttcataagcagacaggaaacctggcataaaagctctggagggcattgcccttcccctcctgatgagattgggtggttgatgacttttctctatgtccctaaagttgcccctctagtttctttcagaggatgttcatctcctttgacaatgattcttgaagaaacaaacaaacaacaaaatctaagctagttgactaggagaagccacaggcaagaagtccttcttggtgtggtagtaacaagcccatctccactcagctgcgctgtttgaatgatgctgttccccagtttcatatttcttttaggtcccttaacagagacttctagggccccctttgtgctgaggcgaggggaggttctgccctggggaaagacctgcctgggaatgcccccacactgtggacattggcagatcttgcacaaagcgggcaggttgtgggggtgtggggtgcatgtgcgctggacccataaaccatcctgcagaggagaaacctttctttccaaggacggtctgccgagctgattgggcctcgagtaatccacaactaggttttattttgatccctttccccacaacaaaaatagcttccttgtttgggcttggtttaacctgattataaaactaatgtgtgatcattgcagaagggtataagccaaagatccatgtaaggaaggaaaatatcagtcttaactcttttgccctgagataatcattcttaacattttgctttatatcccttcaggcttttctatgaaaaaactacttatctaaatatcttttcattttcacaaaaagggggatcgtagtatacaaattggtcttgtgatctgcttttgccacttaataccctgttagtgaatattttgcatgtcaaaaatacagacctggctgggcgtggtggctcacgcctataatcccagcacttcaggaggtggaggcgggtggatcacctgatgtcaggagtttgagaccagcctggccaatatggcaaaaccccgtctctactaaaaatacaaaaattctctggttgtggtgatgcatgcctgtaatcccagttacttgggaggctgaggcctgaacccggatggcagaggttgcagtgagccgagatcccaccactgcactccagcctgggtgacagagcgagactccatctcaaaaaaaaaccaaaaaacaaaaaacaaaaaactgggaaacttgagctagaagtttatgtagagaaagttgagaaaaataagattaaaaagaatgcactttaaaataaactgttagggatagtaagacaatgaaatacaataaacctttttaaaagcaaacaaaaaagcaacttaaaatagggagagacagaaacttagagtttgaaaaagattaaaacttgacagtgttctagttttaaggtgtaaagaatagagaaaaagggttccaaaaacatatctaaaaggtatttaaaaagggaaatgaaacattataaaagaaggttaagagattactagaagataaggcaagtcaaaggagaaacaatcaagacaccttaagttggaggaagctaaaattataccaaatataagtatctaaagccaaaatattatgactattttaacccagtaggcacaaataagagacaatcaggcaggttgttcaagtgtttcatgcgcatacgtgatgaacccagaattgcccatgcttttttctttctcaggtattatcacatttagttatctgagtaattatttgattaatggctttcttccccacgagacttcaagatctgtgagggcaggatccttgcctgtttaacttaggagtgatgaatggtaaatatatgttcattaaatggaagaatgagtgaggcctctcccagaactcgttttccatggaacagggcctgtggcactgtgccccagcagtctggaaagggaattgctcagcaaaggggatggggctgtcggctccccctgcctcaccaaccactagagccttttaccattcaccgattgcccatggaagctgaattatgaccccaggcttgcaggggcttatgggaaaaagggctatgagaggtagaaagccaccatctaggcatggggacacccttgggctgccattgcagacccctgcctgagtggctttggaagacattctggaagggaaacaagggctatggctgtagaggatggggaggacctttcttctggtcactctccttcattcttcagtcccactgcctggggtatgactgggaccaggtcagaaaaggaccccattctgctgaaaaggaaactgagctgccacatggtgaatgacagatgtgaggcaggtttgatttaatgatccgggccatgagactgtgagtctttgcggcccacagagaaggctggaaggcagcagaggggggccaggtggagcagggagccctggtttaatttctaagaggcctacaacagagcacctaggtgccctagaaaatgcgttcactgacagcagtgagggtaccttcaaaattcaagtcctatctgccctacctcaccacaccaaccaggaaattaaacaaccatggtgcccttccttagtgactacatttgtgggtgtgggcaccgtggttcttttctcttttctttctttctttctttttttttttttttttttttttttgcgtcagggtcttgctctgtcacccaggctggagtacagtggcatgatcatggctcactgcagccttgacctcctgggctcaagcaatcctcccaccttaacctcccaagtatctgggagcacagttgtgtgccaggcaacacaggtgactaatttttaaaaaatttcttgttgagatggggtctcattgtgttgcccatgctggtctggggctcccgggcttgagtgatcatcctgccttgacttcccaaaatgctgggattacaggcatgagccaccatgcctggcctcaactgtgattttaaatggtgggattgagattttttccaaaagtaactgaaccaagaaggccagagggacaaaacttgcaaatcgagttatataatgtatacaatatgtataatatatataatatgtaatgtatatattatgtataatatacaatatgtaacatatattatacatacatatataactacgtatgtataagatatgattataattacatatgtattacacatacatatatgatatatattatatcttatacatacataattatatgtataacatattataatatataatgtatgcatagtatataatttatatataatatctgtataatttatgtataatatatagctatataatatatattatttgtgcataatttatatatagtaacatatatttatatataattttactgtgtatatttaaggcacacaacatgacattatgggacatatatagatagtaaaaaggttactgtagtgaagcaaattattatatccatcatctcaaatagttatcctttttttgtggcaagagcagctaaaatctaaaatctaaaattcatttagcatgaatcccacaatcagtacacttttcttacctacagttctcatgttgcacatttgacttctagacttgttcaccctacatatctgatccgaagtacaatggctattaactacttcatcaggggaagaagcagaagttggtggaaactgttgaatcgtgaatttctttcttcgttttatagctggtgaaattccatgttcctgtggtgggtagtgcatggcaggagccgagatcttgttttatcaagatgagtgggcctcacaaacaaatgatttcattctgttgaaaggcattatcactgcatctgacatgaaaatattgtggggggaaattagaagtggaagtttataaaatggaagtgtccgggggcagcctgcattcatatcaccgaaacttcagcatagctttttttttaaagatagaaattttgcccacatatacactaataaaaataaatctgtttccgattactaactatgcagccaggtgcttgtttgttatgagaaaggcatgttcattaattttcagctatgaaaagtgcactgtgccataaatatacaattcaaaatgtactgctgataaatgaatacgcagattgttaatgtgccagagaggggtattaggcatccagcacaaggcagacaggtacccaggtgatggggctggcactttcagacctggcgttccagcaaccacctagccagcctctgacagtctgtgctcctgtctttgggaggagtttgcacagcccctctttgggaggcttcaacttgccctgttttctctttattgtggcagattgggcagtgatagctttagggaggaaggcaggtggcaatgagttgcccgcagaggcattctacagagacgcggggatcgctgcttccctccttcatgatgggtcagtgctcctcgatgtagagtgttggccattgacctctcctctatggttgcaaggaagcagacatcagagcttcctggaaagctagaagtaggtggctctcagcccagatgcatcctcacctctctccaaggagaaggatatgttcccactgtagttatcctcatcgccttggactgggagacatgtcctgccttccctctttgaatgccgtcacatcagaagagtgacatcttcttgtccccgacctgagatgctgatcagcattgtagctttgcatccttggcaggacctgtgtctgctgccatgagtctgttgcccgggtcaggcgtagagtggggatggatatcatatctcccatttggcctcctcagaggctgagccctggctggagaacaaaggaaataacactctgaagtgtgggtggagtacaaggatgaccatcaccacttgagatcgtttcaagcatcttcagttttcagagcctgaatggaggggagccgtgggtaagatgggctgctcctggcagagcatccggaaggtgatgtggcttggcgaggctttttccttccttcccccaccagacaccttgcccagctctcagctcctgctcaagaactcttttctctggttcatctctcgcagcttggggctcctgactccttcccttgtctgatagaatgtcacagacccccaatatattttgtttacattaaaagctaatgcagctatgacgtgaaattttaatttatacacaaaccataaaaaagccttcaggttcatgaattcctgatgaggcagagactaacagtatattttgatatgtttacagtttatgttttccactaagaatatctagtttgtgggtctgtctggggtgctagtaaaagaggggaaggaatggaacgaattcaagcagttgtctcagccttcattgtgtctgcggccatggcagggtttgaaagcattttcgggtatgagctgaaatttgttgtactgcttggtggtaaacagacacgtaactcacccccacagcagacattaaagtgttacaaattaacatacacatgtaaaattttaaatataattaatttagcagataggaccttgcagttgtcacattattatttaagtcggatgcttggggtggctcagagcttacatgggtggggtaaaatgcaaggagaccgtatgcacgttaatgacaagttaacttgtgtctagttgagacaatcacgaagaattaaacaaagcttttagagggtttctggtgctatttatccttcccctccctaattttcataacatagatttataaaggaaattagaaatgaggcagagtccataaagggtccttggaggataatccatacatttacattaagtataattcgatgtatcatctacgtgcaaacttttgtctgcaaagcatatggcaaagcttttatggatatacagacttttattttaaacttaaaatgatgaaaagtttctgagcttcaggatcctcttactggtgactggagaaattgttgatcacatttttaaaattcagagaattagaaccataaaatatactgcaaaacacagaatttaaaatggttgtttttccaatgcctgcaaaattgttttattaggggactgcggaacacctgccttaaaatgtcgttcagaacatctcccgaatgtcgttttccttaattgacttggaaatggcccaaatgtattgctgaatgcagtctaattaatattaataataaatgccattattaacatcaaagaacatctggtgctcctgtttactctgaagccttatatgtaacacattttgtggctgtttcatcttgcaaacattgtgcagtaaacagtttttgccatgcaggtcaaaacagacccctgtccaagcataatgcattatatttaaaaaaaatcaaatattttctttgggtcacattcgttgctgtgatacgagtgtgggttagaggtcccttgagtaaaccattttgaaaaaaaaaaaaagtgctgctcccagcatctgtacattggctacattagagttttgtacaataaatcaaccactgaataactttaatctaaaatttcattaagtagttcttgtcaggtagtaaagctggataatgcagtgctgtttaatgataattggtgtttggttaataaattctgcaagttcgaattactttctagcaatctatagaatgcaagcctcagcagtgtaactaaacctcaaattgattaacttgcatgaaccaggcgttcacaaagatggcactattccaaataaaaaagagaacagcgcatcagccggatggtgttatgttgctctggagtaaggaaataaatcccctctgggtgcatttttaaaagcttatgcctttgaaatgatgtcatcatattttatttttttttcttttctttcatattttctttatatgtacacacacttaggtcaccagttcacaagacacgtgacacattagaataatggaaagcattttttttatatcatagaatcaaaaccacaaaacaatttagctggaaagtattattgaaagggcgccattaccagcaagctgctgctctctagcaattaatggaagcagggtgtggctagatgagggtttgctgtttccttcctacatcttgtgtgcgcaagaaaataaaatataagagccatttgcaagtgaaatcagcgcctaggttcttggagttgcgcttaggagtcctacatcccaggtgcaacgaccctgcaggacagcaggcacctttttctggtgggatttgtatttgggatggacatattggattaagtgcatgaattatgttgatcttctctgtgcccccaaccccggtgactcctgtgacattggtgtcattcaatcagcagtctgtaatagttccaagttaaaaataacatttattaaatgtcttgtaacacaagaatctggtctatgatgaagagaggaaaacaaggcatctaatatcagaagaaatgaaccaggctacaacagggacagacagggaggtgtgtctaccaggtcctccactctagactagagttgaagggtggatggaggatttaccccaaatgtgggactccagaaacacagctcccggtggtcacaaccaacttgttttggaggtggagcaaggtcctggtgggaagattggtggaagaccaggtgcttgggatgtgtgaatgctagaacattctccaccaagctgtttctttctcccctgcagatggggggattttgaaggattctgagaccctcaaactcagggctgagcagtttatcagcatctgtgtgcactgactggtgaggggcacgttgggtgctgtgtgggacacacgagagcccattggctttctgtgtgggggagcaatgcaccagctcagtgagacctggcgagccaggtcctgtttctacctgcctcagagtggtccttgacccgtggcaggctttgctttgcttttgaagctgagcagattgtgccaaatggcgtatgttttcaaagtgattcccctaaggagaggagcacagacctcagacacaccccttctactagcctccatagattattcaattgaagcagtttgtccacatccaactgggtggttagggagaggttattcaatttactcccaccctcaaaaaaatcaaaaagtctgttttcaccctgagcctccccttaatctcgttgatgtggcaggggtggcatgctgggtttcgcatgctctctttctgattggttttctggtaattattttacaatggtggtgtctggaagccagaacccctgggtcctgcaggggggtcaaagagactcacagggagatgagaaatggtgtgactgtgttggagcaaagaaagatgaccaagtagaagagtgaccagtagacgggaagacccagtgtcccaacctgcaggaggaccttacctctcttttccaggactttatgcagctcttctggtggcttttcttggggcatcaagaccagcttcttctgcttgattccagagggcaccacccctaccccaccatacctgcccctccaggctgtgcttccatgctgcatgcacaaagcacctgtcttggcctccacatccagaaactcttctcatcccttcatctccatattgtacttgcaacgtgaggacccctcattgttgactccggctctgggtagcttgcagagctcagtatcaggaatccagtgaccttgactccagtctgctctgtccttactagctgtgtgagcctggatttgtaattcaacctctgtaagcctcagttttctcatctgtacattggagataataaaactctgtggcccagcgtggtggctcacacctgtaatcccagcactttgggaggccgagatgggaggatcatttgatgagcccaggcgtttgagaccagcacgggcaacatggcaagaccccatctctacaaaaaacaccagaaaaaactaaaaattagttgggtgtggtgactcacacctgtagtccctgctacttgggagcctgagatgggaggatcacttgagcccaggagttcaaggttagagtgagttatgatcgtaccactgcactccagcctgggcaccagagtgagaccctgtctcaaaaaataacccaaaatataacaacaacttctgccccaaagggctgttgtgaggatggatttagacaatgctttgaaagcacatagaatgtgctcgattaatgttaactgctattgaagtagttatcgtttatgataagagttcagattttattattattatcaccattacttttagtatatttattttgctctccctggtgcatgtgaagcgccttcaggataaaaacctgaatcatcctcatgggaagtgtcccgtgctgttaggacagagtaggatctcagacagcgctctatgatcacagcagcaggaaggcacctcaggaagccattggtaaaacacaggggctttctcggtcttataccttagccagaaatccacagtggacaatatagaagcagatacaaaattgttcctggccttcctcttcttaatggaatctcccagaagtaaaataagaatgcccattgctctaggccaggcgtggtggctcacccctataatctataatcccagaactttgggaggccaaggtgcacagatcacccgaggtcaggagttcgagaccagcctggccaacatggtgaaaccctatctctactaaaaaatgcaaaaattagcagggcgtggtgggaggtgcctgtattcccagctactcgtggggctgaggcaggagaatcgtttgaacccaggaggcggaggttgtagtgagccgagttcatgccactgcactccagcctgggtgacagagtgagactccatctcaaaaaaaaaaaaaaaagaaaaaaaagcaataaagaaagaaaagaaaaaagaatgcccagtgctcagttgagaatcctacataggcccagagatttatccacagagagacaagggcagaagggaaaattgggtggacatgtttgctgtggtctaattgctctaagatgaatgaggaccatagagagaactaggtacctcaccacaagatgcaaacatcagccaggaaggacccaggtgcctcctttgccgtcctccgtcctcctgggcagcttctccctgcacggaccagccggcctggtgtgtgtctccacggcactgaacctgtgcagggcaggctctccatgaatatttgctggctgaatgaatgaactcaggggcaacaggaaaaggacaacgttcaagccaacactagggacataaacttaagtgagacaatgaggccagaaagtctaaagtgttttctgtcacttggtcagatctttctttctccttgaagaagccctatgaagaaagccctggaggagatgataatggcgcctttcaccacggaaaggtcaacccacatgtgttcattgagtgactctgtgggccagcccttcgctcggctctgttgatgattacgagacaggcaaacccacggggtactcttggtaagtaggctggaatcaaaacacatgagaaaaattagtgagcattccaaagcagcatgtcattgtatagaaatgttcagaaaaggtttagagacggagtgtgccgggaggccaggcgaggcttcgtggcggcagtggaagtgcgaggcttcgtggcgaggcttcgtgaagtggtgatgagaaacgcttgaaaggcagggaggagaaggtcgggccttctaaacttggagaagataggggaaggccaggtgtggtgacagatcccaaggccagtgcagcagtgaagaaatgtgtcactgtccccttggctcaggcccagccaccgagtcctgggacgtgatctttacatcgcctggttctctggttgatccatctttccctctgatcactgcccttcctcctggggcctttttgaaatctgactcaggttctgagcacacgtttcagcatttctggatgcaatttggtatcatagcgaagaatcaaagggtatttgctatcacttgaaagtctgtttctctccctcttcctctgagtacctgaccccacaatcatcactggctttgaaataacagacccatcataattacgagaattagtctggaggcttctgccttatttgcctaactgagattattaaggccgtttttagaggtggaaagggctcccaggatcatctcggctgagatggcaaattcagagagatgcctgcagggtgggggccagccaggtagtgagggtggggaaggggcccggtggggaggacgcatccactgcccagcccatcaacccttgctctttgggcccatgggctcagcattgggagataacacagtttctcaggagaagctggaaatgctgaccatgtgtgagtgaaatgtcccaaatttgtatatgttaaaaacaaacttatagcctgcgtgacatagtgaaatcctgtctctacaaaaaatttacaaaattagctgggtgtggcggtgcatacgccccagctacttgggaggctgacacgggaggattgttggagcccaggaggtcgaggctgcagtgagccatgatcacaccactgcattccagcctgggcaacagagcaagatcctgtctcaaaaaaataataaatacatacatacatacaaacaaaaaaacaaatttaacacatgaaaaccctgtgtgattaaacctttgcatctcaattagagtcctctgcccccattccatgatttgggggtgcaaacagaagccccgaaataggaaaggacttgggcgaggtcattaacgtggtgggcacagcgtgtacctaccccctcctttgccaggtccgcagagttatctacagaggtcagtctagcaccctcccattagcctgctgcttgaactgtctccttctttccagaaacttctgcatgccagtgaccagatcagcctctctgtggctttgaacccagggtgcagaagcctgatccagtcaatgctccaagcacggtccagccatcacctcgcagctggccctgtcacctcctgttgcaggcgaaggggcagcagcaacctggcagccctgggcagctggcaggaagggccaagcacttacgaagggtagcttcagtgttcttacagggtattaaaggaatacagcgagagttaatgcaaaactccttctttgacttaatttattataatatatgtggctaaaatgtagatcacactgctgtgttggatctccgttttgattcccaaaattgcaatcatgatagtggattataaccgtgctctaacacatagatgaggaaatgtattcctgtgcaattttccccgaaggagaagtcagaggataaggggcaggagttttgaataaccttgcaacatttagttgtctctctcaattataggatagaaattagcatcccaggatgatgtgcgtgtgtacgcagcaccgctttgaatattagtgcagaaggacatctgagggaatggagaaaatgattttccatatgaaagaaaaagtcactggtatcgaatcgagcaatgtgatgttgccttttattcagtaagtgcctactatgtgctgggcacctagctaaaggttgggggtgccaccgtaaaccagacagaccacaggtttgccatggaagtgagccttagcagtcagtgttgggtgatgcccaaaaaggagtgaaccagggcagagggatgggggtgcagggatgggggagctatgggagagcctggattgcaggctgagggaaagaaacatcccgggagcagcacgcagatgggaaagccaagtttgcttccttgttctggtggtgcgtgcagagcatccgtgtggcgggatgcccccaagaacatacatctgggcggactttctcctcaggcccagagactcagcagaagtacccaggcagaacgaacggcctgaggtgctgccccagggcctggactctgcagtctccaccagcaacggttcaaggccaacacctgcgcagcctatcgcgtcccaaggttctgttggcccaaatcaagccacctgcctcccccagcccagctctggggtggggctcccaagagccaccagccttgctgcaaaataggattgaatttctgtgtggatgtcgagccctggctggggcaggtgtggacagggaagggccctgtggcaggagggactggaagctttgcacagcaccttggggcaggtgaggctgggaagaccaagctgacttctccttgccctccacggggttgtgctctggcagtgggagccctgcactctctcaaggagagcctggaggagctgcagtctgcagctgcaagaggagggggctggactgatggaccacaagggaatggagccctgggataccagacaccagattccccacgtccagctttccttcctggagagagcctgtggcagcctgtccactcacagacacaggccacctggacccactgccaggccccacaccctggaagggcaggtcagaggtggctagttatgtacttaaaaggaaaaggcagacttcttagattgcatgatcatggaagggtggccagccctccccaacaccattcattcattcattcattcattcggctggtcaccagtatttattgaacacactgtgccaggaggctctaagggacacaagagtgagaaaaacagaccccatcccagccttcaaagaggtggcagtttggtggcagagacagatattaatcacacatatacgctcagtgcaaactctgagaaatgtcctgaaggttaaattctgggatgattgggcagacctgacttagtctggaagatgagagcaaatgacattggagctgaaccctcaaacatgagtgggattaaccaggcaagatgcaggtggtgggcctggggctggtgtttggggtttgcatttcaggaagagggaacagtatgtgttgagattctgaggtccaacagagagagaaatttctggcccggtgggccagtagggccagctctgggatttttaaggcatttcaggatgagaggaaacatttcttagatctcattgcagtcccaagttcctgaagctcttaaattctttttcaatatcagggcatgtgttctcggggtaggggatgagccagccagggggcttcccgggtgcaagcccccagcgtgtaggactgaagggccctgggacctgtgtagttgtggatgaatggggagctctttggagatgttgagagaccaatgggatgctgaggcctgagcttctacctgctgtctgcttctttctccctgtcatcccagtgcccacatccccccaggtcctcatacccccaactccttcacctactcccctcaaaggggtgtttggaggataataccaagtaagctctaatttctgggttagacaatgtgggagagagtgaagatgtgttatgtctacatggagttcctactcagggctcggtggtgcttggcattaggaaaccttgttgatcatgcagggggaggggctgaccattttggaggatcctatggtgactccatgacatggatcaccacctgctggtttgctgttttatgctggtttacctttttcatactttagaccttgtagatggtggggttgggaggctaccaattgggactctgctggatgaccttttgtccacagtaggaggccttattcccatgtcataggcagtgtttggaggctgggcgaaggtaggaggcatttacaaacacacagctcggaagtggcctcaccagacggagcccagagccggccattgcctggtcagtggcttccccactctgccacgcagggtttaaagtgcatgcagctttgcaagcccattgcctcatgaagcactcagaccctctgtgactggcaccattctccagtgatccaactttaccaacaaggaaatgaaggctcatgaagctttggcgctttgctcaggaccacagagccagtgctagcagagtttagattcagacttggctcccggagtcccttggtgttttgaggtgctcgaatgcccaggcaagcctgttcaggcagcattaaaagtggcccgtgtgtctccctgtgttgaggaggattgggccatctctgtgcatgtctgggggctgtggggacactttgctcagctacctgctgctccccttccctgaaaagcaagggctgctattcttgcctgcttcttctggggggcttgttggaggacacactcatcttgggatccttgtctctggtctgaatttctttggaccagtctatgggattcccagactttgggaagttcccattgagaatttgccagacttgttattttcatctgtgatcacaagaaaaacaagcaaacttgaccttcctcctggaagctgctacccaggaggctagtcctggagctaggtcagttcatttattaaagcattcatttattcaccccatttggggtgaatattggctggacaccggccacgtgcaaagtatggaggaggaggaacctcagcccttgtcctttgcactttacaggctagaaggaaagctggtgtcaaagaagaacaaaattcaagccctgtatctagccagagaagccagctgggggccacttgggatgggaccaggtgctaaccgcggtgataactgggagtgacgtggcctgacttataatcaagaaaggtcacccatgtggatatatcagaagaaaacaaagttgcctctcaggaactaccaggaataaatttacactcctctcagtctctacaaggggaaacacagtgaaaacttagctaaaagtgtcacagttgtattgtgtaaactacactgcccttcaagcagcatgggacatcacactgccagggacacgaacactggaccgggagggccattcgcagggcaccacccagggcttctgttggtctgcaggtaccaagacaatggacagtggagtggcctcagctgtctccttggctcctctgctctgtggcctgagccagacctgaaggttttgtcctttggaagtccaccagctgggaacaggtctccagaaagatccatgtgcctgtgcctgattggcagagctggatatatatacatatatatatacatatatataatatatatataattttttgctaattttaatgtcaactgaagtatttattactacaagatattgaagggttcagcatttattcaaaaaaattttttaagctgatccaaggattgcgttcatctgatatgttctcaaatgaaaagggctagataagtcagtgcagctcaaaaatggcagtaacttcagagctggcaattgacacttgttttctgccactgtttactcttcaataaaaaatgcatatttaccatagcaacctcctgatcacgtggagccctatcctacatgcgaccctctaaaacagaatagcttcttaaaggaacacacacatcctaataggcatgcttttcagatgcaaaaacgtgttctttataaggaagccctctttcctgggatttagtgctaataaacatgtcatccttgtagaaatcattttggtcccctgtcttaaattttaagatgttcattctggaaatccaaataaaattactcttggaggggctttcaattatcttaaggatttgttgattatttattttaatatggttctaaatatatatatttgtgtttatacatgcacataggtatatatattttaaacagcaaccgttagtatcatctggaagggagtttggtgcagattctaacgacctgccgcttcatctgtgattaaagattgtcatctatgcgaagctcagtggcagcctgaattgttttttactgttaacttgggaggattgcctggggttttagagctttggaggagctgccccaactggacttttcagggaaggatcatgtcccctcatgctggcactttgtatgtgtctgattccatagcttggagctggcttggggttggcgcgggggcactgccagggacacgaacactgaaagctgctactcaggaggctagtcctggagctaaaaccacagatctgccccctccccatgccatctttacatatgacgcgttgctttggcaatattcatgttgaaagccactattaattggagcataacctccatcaggcaccatgctaagtgatttatataccttagactctacaatcctttgagacatgaattcttgtgactattcccgttttgcagataaggaaaccaagcctcagagaggttatgtaatttgcccaggattacacgcctaagacctggggaacttggttttgacctggggcttttggactgcaaacctctccgcttattctgtcttctgaacctgtctgtcagatttagctctggaaggacaagtggcgacaagatggagaagcctttggagatagggacagtgacagtggcttccctctcagaatgcttcctccagagattcctgggtactctcagtttcagcagagatttgtggaactcttttcatactctgatttttttttttaatgcctgcacctggcagtcaggcacccttcccctgtgctgggctgaagtcagggctggagtgccaagggtctctggatgccacagccccagggagaggtggtatggctgtgtgaccacaagtgtggtcaatgcctctctgaggcaccactgtaggctaaggaggcatcccagccgggcctggtggatttttagtttctttcaatgtgagaaacaagaacgtatttgtgagtctgttatgcttagtggctttggggcaaaatccgattgtgaagtgaagctgggttctccatggcacagaggcattgtgacctgcactccacggaggggcattgcccccaccccgtgcccaggccagccaatccgacggcggcaggctcacaagccatttcataattatccatcacgaatgcctccatgccgccctaatagattatttaaaatggtgtgtgtgtctctcatgcaacctcaagtcagccccaaactgtacatgcgtacagcctgggagaggtaattgtttatcatgtatctctttgttgcagacacttttataaaagagtatgtattatgtatggtgtgaccttcaaatgtcaggaatgtgttttgcaataaactgtcaatatttgtggttataaggtactagatgacttttacaataattggaacggctatattaaaagctgggatcactcggctggttaaagagaaagacacaggccagcgttcatcagggacttgccttctgccaactattaaatgaaagatagtgcaaggtgctcaagatgtcttctttgtttaaaaaagaatatggcaagacacatctctaggggaggcgttatctccaaatcatcccttctcctttcagtgtgctcaattcccaggagaaaactcaactccgcaagttatagtgactgaccaaatacattttaaaaaagattggtccagtttgttcctggtgtcatttaggtaagaattcctggagtcagatcttccatcttctcccctcctccacccccacccaaacaggaggggctgtaaattatcttaagaggatcttaaaagctatagtgttctttttttctttcttagtaaaataaattacgtagacatcttttgggaatttatgctttagtgaaagtagaggcttatactataattttcattttttgtttaaagaaaggagtacttaatttaaattatgaagaagcaaaggcataacaaatattttattataattattatagtaattggatcatagattacattaaaaatatctgtttcactatgctcttctatgggtgagtatctctttatgcttatgtgaagtcgtttctccttatgatagtcagatcttcgtttttaaccaggaaggaattgagtaaatgaaatggggaaaggggcctcacactttagtcttctaaggagctctcttgtggccttgctgattataattgtgtgtttgtggttccttccacctggatggagggagaactgggtgacaccctgaggccccttcctccaggaagcctccctggacatccccaggcctcctcaccctgcaatcatccaactccagcacctgcatgcgctgaacactctggagcacttccgatgttttgacggtgccctggactatttctccccaccagctgctcaaagtagcttccctctcatagtcaggaactggtcttaatatctgaattccaacttgcttgccttccctgatgcttttatttgttgaaaaagtatttataaagcacctgctatgagctgaggacgtctcgcatgctagaaatgtcacggcaggccatagtgcctggcccctgttctcctggagctgacattctaggaaggggacaggcagtgagcagtttaatacacagatcagctgaccatctgtgaagggcgatgtggaaggtgacatgggctgagagctgggggttgggagatttccttccaacagtgcgatcagagacaatctctctcagagaggtgacttttacacgaaagttagaagagcattctaggggaaagagaattccaggaggaggggaagcaggaccaaagccttactggagaagggacgtagcctcagaggagaacagaaagttgggaaccagcctcagaggagaacagaaaggtgagggttggagtgcaggtggggagttgggatgaagtcagagcagtagggaggccacctggacatattgagacacagctggaggttattctaaaaagcaatgaaatgagtagctggtccctgccctgcccccaaccagaggctgttcccaggagatggcagcggcctgggctgaatctctcagactcattctcctgcctgggtcttctcaccaaggccaggttcttaggtgaccctgctcagcgacacgaatggtctctggggtgggctccagcccacagtccctgtcccacagagaagagacaggtgtgcagagcccaaagagacatgtcacacctgatgtcttgtcccaggtcaattctgtgaatcccaaaccttgcccgctgcatccagggttgcagtctctagcctggggactgagagtacctgcccacagccagcccatagccaccccttggggccttggcaagatgtggcggtctgcggatgacaggggatgttgtcacagcagcatcacatggtgccagagggcagagaccccatgggtggcctaatccccagcagggagtttcacagactccaccaacaattaagaacaggttcaggggccgggcgcggtggctcacgcctgtaatcccagcactttgggaggccgaggcgggcggatcacgaggtcaggagatcgagaccatcccggctaaaacggtgaaaccccgtctctactaaaaatacaaaaaattagccgggcgtagtggcgggcgcctgtagtcccagctacttgggaggctgaggcaggagaatggcgtgaacccgggaggcggagcttgcagtgagccgagattgcgccactgcactccagcctgggcgacagagcgagactccgtctcaaaaaaaaaaaaaaaaaaaaaagaacgggttcagggcttgggaaaaccagaaacacatttggcccacagttcttgatcttgaagccctggtatattttaaggaaaatgtaatccatgtgtttctgattcattttcacttaactcatcaaaatgttgctttagagaaggtatttgaaatcctagtgtcttatatttctccctttttctttttttgagacggattttcactctgtcacccaggctggagtgcagtggtgtgaactcggctcgctgcagcctccgcctcctgggttcaagcgattctcttatctcagcctcccgaatagccgggactacaggtgcctgccaccacacctggctaatttttgtattcttagtagagatggggtttcaccatattggccaggttggtctcgaactcctgaccttgtggtctgcccacctcagcctcccaaagtgctgggattacaggtgtgatccaccacacccagcctcctttttttttttttttttttttttttttttttaagaaattagccttttgatgacctacttccccaattccagaaatcgtctcttgccaccagcaaatggaactctgcccagttttgagtttgggtagagggtgagacatggcaacatggaaaacatgccacctctctatctcacgtgtcccagggctcaccagtgaggtccaatcccgaccccgttggtaataacccacgagcaagctgcctgttgcctcctcacaagtggacatcgttttctaaaatagctctttatttaaacaaatactttcaccaatccataagaatacttaactgtttaacatgactatatatggccaccataaaattgagcactctgatgcaaccacagagacaccaagttgatactgacccgaggcatgagttatgtcttctaagagttaggtagaattgtttacagtaatgttataattttcatgcataccattaattttaaataattaaaaaaaataaaagggccagttgtgattgctttatttgagtctattaaagctttcaaaataagggaagtgttaagcttttaacagtagctatacattcctttggactttccccaaggtgtcggtattatcttgctcctgaaaagatcttcaagccctggcatacgtgggcaaggacattaagaaagatgtgatttttttgttgttgttgtgccactgaactgcttcttcaccccttagactccacaaatagttttttttcttcattaatgaagtgagagctgtgattttgagacgttctttgcacaaagcatacttgcagaattaactgacaactcatctgggaaaatgtatttactgttatactagaagctccatagaaattaaaatatcatggcatttgatgccataaacgtagtaagcgccagggtgttcacagagttagtcaccttacccatgcgtgcttgctggggtaactctccagtcaccatcatcattgccaacagcatcatcattataattttttttaatggaagtctttccaaaatgtacttctgggcatctgaagggtaaggctgccagcgagttgggatgaagcgagaaccaagaatccacatgcaatataagaagaagtcattctttcctttctctttgtcctctcactctgcctcttttggtttctatctctggcttctccctttcattctgtgagttaattggactccctggaagattggatataaacccagaagacttcaccagtagaggattgactcttcttagtcaatttctgaccttttcccacaatggctacccccaacatctctatggcttaatataaccaggatttgtttctcattcatgcaaagtgtgatgtgggtcagctgtcatccatctggtgactcagtgacccaggtgccctctattttgtgattctgttgtctcaacctttgcgttgcaaggtcactgtggcccaggaggagagggcggaggaggtgcaggcacactctgtcttcatttccttcatctgttggccaaaactgaccacctgtcctcagcttagtgcaagagaagttgggatacgtaggggtccagggactagttagcaaccatttgccgtcctttttacagtcatttcttctcgcctctttaagacccaacatcagtatcttctttggctgtagggtggggtcagcggggagaatgagaggccaaaaaaaaaaaaaagcagcgggcagagacagcctgggataggcttggagctctttcagcatggcgggacccggaggtctagtcctcgtgggtcagatgggaaccaagggcgaggggaggggtgaagggacttgcttgggatagttggatattagggacccgggaggaaaagattctgcctcctaacgcctgagtcagcatttttggaaaacaacgctattttattatacaaagaagttcagtgtttagagagaatctagggggaaatctacccttcaagtacaaaatcattttataaacaaagttttaatatcccaaacatattatatataaataaggttaagtgtgtgttgaggcacccatccattcaaatcatgtttgtatacagcaagatagccaacctcaggggtggtttcagacagctggtgacagtgttttctaagtatcggggctttaacttttgagaagttgtttgtctttctgagcatccgtttctttgtctaactggtactgccgctttgtggtccagtggatgatgaggattctaaaatgatccgtagccattttaatccccccaactccttcagcccacatcccctcctctgaatacttggggaaagcatgcaccttcatgtcaccttgatcgaggccaaccttgctatagactcggaggataagaacaagcgaatgggcatgtagacaacattgctgaccttgagaagacaaaattaggaaggtctgttgcctgatgtctccttgttcctggtaacagacctttaaaaaacttggatccacctcctttttctttagcaagtcactttcagcttgtaggcacgggcagaggagaaagctggcagagcttttgatgcctacttcaacacatttgctcttggctacagtctaggagggttgcaaatatggcctgtgtctgcctggaatattattcgttgtacccatgcaaggcacccacatctgaagaaataatcccatattattcagtggagtcaagaaaagaaacaagggccacaggagctgtttctcagctgtttctccatcaagtgggagcccagagcacacccaggctgagggtgcattaggcaagagagggcctccccgcctgcagccaaaggtcccctccagggacatctcagtctctaggagctggcaggggtctgtcatttcacagatgagcagggaggaacagatggcagcgttgaggctgacctctgtccacatgtctgccttcagtctacccagcacattagagaaagtgtcacataggagggaaggaataccactggttagaggaaaagaaaattaaaaaattaaataaatctcaaaccaatgcacgaaaggtttaacaaaggatcacagatgcaatttttgtaatacctctctctctgtctttttgttgttgttgttgttgttgttgttgtttttgagatggagtttcgctcttgttgcccaggctggagtgcagcagtatgatctcagctcacttcaacctctgcctcccaggttcaagcaattctcctgcctcagtctcccaagtagctgggattacaggcacgcaccatcatgcctggctaatttttgtatttttagtagaaatggcgttttaccatgttggccaggctcgtctcaaactcctgacctcagatgatctgctggcctcggcctcccaaagttctgggattacaggtgtgagccaccatgcccagccaatacctctgtctttctactgcctgcttcctggagtggctaggaaagggctggtctgtctgcaacataaaccagtgactgctttctccacctgatgttatggggtgccaggagaagtgatgggactccctcctgcagtttgcagaggggcagacgccagtgcttttatactcggggtagagaaggaatccaagagcagatgcacgttcccctctgaatgacactctcaggttcttgctggggttgggccaagttcagcacacacatcctcaccagcacccatcctggcacaggctggggctcacgcacagtgccctgcgggtgtcctgccagcacttgctcccccagccttcactgtgcttggctttcagcctctctggacacttcctgggaccacccacgatagcccttcatcttctctcagcatgattttccagtaggattagtctaaccataaatgccataggccttctggccctccaaaaaaaatcccttttctttgtgaagtaataattagactcttaaatctgcaaagaaaactgtttatcttacaaatttattctttttattgggccacacatatccaagatagaaagataaaaggaaaacagatacaggccatcacttagagtgatgtatagtgaggcagggctcatcctcaagttctgcaaaatgttccacagtgcagggcggccgtatcgctatttttatctgtaatgtggcctgggcaagtccttcccaaaagctccaggagaaatatgccctctctcatttctcctgcagtgtcttcttttttgtgatttttttttttttgaagattcagggggtacatgtgcaggtgtgtggcatgagtatattgcgtgatgctgaggtttgaacttctaatgatcttgctgtctaagtagtgagcatagcggtcgataggtaatttttcaaccttgctcccctccctacctcccctgcccttggaatccccagtgtccatatatatttttttgagacagggtcttgctgtgttacccaggctggagtgcagtggcgtgatcccggctcattgcagcctcgacctctcgagttcaagcaattcttgtgcctcagcctccccggtagctgggactacaggcatgccccaccacacccagctaatttttgtatttttagttttgccatggttttgccatgttgcccaggctggtctggaactcctgacctcaagtgatctacccacctcggtgtcccaaagtgccaggattacaggtgtgcaccaccacacctggcctccagtgtctattgtccccacctctgtgtccatggtacccaatgcttagttcccccttataagagaacatgaggacattctcctgcagctttattccacagtggctccttgctactgctctctggcgggctcctctggaagaagctttatgggaaggtccagagcatgccacaggaggccccgcaggaattacccttctttttttttttatttttcatattttgagacagagtctcactctgttgcccaggctggagtatggtggtgcgatctcagctcaccgcaacctccacctcccaggctcaagcgattctcctgcttcagcctcccgagtagctgggattacaagcacacatcactaccacctggctagtttttgtatttttagtagggatggggtttcaccctgttggccaggctagtcttgagctcctgacctcaaatgatccacccgcctcagcctcccaaagtgttgggattacagacataagccaccatgcccggcccaataattacacttctgaaacctgcccctgcctaccttcatcctgaagccaacatccaggacaccttagtcctgcttataattcaaatcaacagtgattggcctcctaacttaaattaggtatctcgactatgttgccaggagcacttgggcagaattttaatcaggctcatcattatttgaagctgaccttcatgattccagcaaaagggaagctgagggaggccgggagggcaaatgcagcatgctcagggttggggtgggtgggagtgggagaagggtagaaggagatggccttgccactgtctaaagctagggtatgtggttggctggaaatgacatctagccatcactccttctggcagcagctccttgtagattcaacctgcaggacatagagccactgtgaccatatgtagagcatttgtctgatggtgactttgcaacactctcttgtgtccatttgccctgatcaataagccatctttgggggcctttccacattcatttgggcaaccacaatctagggcttggtggagtgactttgagttctagatgtggatgagcctaacttcctacttgtgcaaaattataggaaaaaaaagctaggtaattataccctttgaatagctctccaatgatggttagaagagttggggagaataggattaaagtgagatttcaaatataaataactgtgccagggtgatgatatggtcgtacacagtccaactgcagagagaatgctccaagccaagagtttccacagttgcttagagcgaatactcaaataagaattaaatgtctcggacccagtgtagtggcttatgcctataatcctagctctttgggaggctgaggcggaaagattgcttgaggccaggagttcaagaccagcctgggcaagatagcaagaccctgtctgtgcaaaaaatagaaacttagcaaggcatggtggcctgcacctgtaatcccagctacttgggaagctaaggcaggaggatcccttgtgcccaggagtttgaagttgcaacaagctgtgattgtgccactgcactctagcttgggtgacaaaatgagacgctgtctcaaaaaaaaaaaaaaagaattaaatgtgttgtccttcatctttctcatggtctacaagtctgccgcttttggctgttagcagagaacaccaggaacagacgttgaggaataaaagcagtttgcattttccattgcttggaaggcacagatcttatttattgtgatctctgcagaacccgcagatctcattatcccagaaggttcccttgttctcctagtgggatttaccatgaggcctagagggtgggctggaagctacggtgaggatcaccccgctatcctcaggagcttagattctgtgccaggccttcaggctcctgctctgtggggatgtccatgattctggaagaaaagtgagcccagagaaggttctcttgcttctcctcctcgattccccaattgtgacctctttggcagtgtgatgtcaggcctcgggggctgcaataacatatcctccaaccactagacatttttccagttttatttactattatgtcccacaatttctttgcagaaggcagccatatgtaaattttattccgttttctaatggtttgggttacataacaaataacagcaggaaggaaaatttgtatcgatacttgacagaggaagttctcaagtcactgcaaaaagatgtgtctgcagtgctgtaagtttatgggagttttgcagctgagtctctgcatatgactttgaatatgtcactatatgtttatcatgggctaattgtggaatcacatttccatactttttcttctccctttcatgagattacaccagccagtgatggatacaagactctacaaggaagaaatgatcagttttggataattttctttcctgtcccaaaatagccatatgtctgcatgtcttagggactcagctgacacacattttttttaatttgttgcttgctataatgcaaatatgatttcagtcccatagtgaactctacagtgagtccatattataaattaatcagattcaacaaacaccaacatttttaaacttttgaaaaaaatatttaataggaactaagcaaaagaagaaatcaaaccagctgctgacacagctgtttcttttcttgtttaattcagttcaatataaaggtaccatatgctgcttaaaatggtgataggaaagatgaaataatttaagagaataacaagaaaatacatgaattgtcagcattctgtcagatttaaagaatgaaatagacaggtgtagtattgacatgtttaactttgtgtggtgttagcagttttggtgcgaacaactcctgacatgtgctgaagtgatgtgagaacgtttctccttcgctgcagacattggcgaggaggctgggagatctgccggcgtccagcaaccagcgctgcttcgcgacagaagcctgggctcggccatgaaggactgcccgtactgtgggaaaactttccggacatcccatcaccttaaggtgcacctgaggatacacacaggtgagaagtctgagtgcatccaggggcacagcccagagaaggaggaggtccccgtcctgcctgctttctggcccaggtccacagctgtgtgggtcactaactctggaaggttctccctgggcctgtctagccaccattgtatggctcagaagcggccctcatttcctgattcgtcacttaactaacattcacctcgcaaatgactcagggactcgtaaatgtagacttggatggtcctggcctgggataactgggtcgcgtctgagcctctagggcgttttgctaatggtttccttctgctgtattgaaggagtccctccccaggcgcctgtatgaaccaggagtctcccaggtgtcagtgatggggtctcagctcaaaccttcctaagtgcagaagggaatgaagccacttccccaagcatccaggtagaataggctttagcccagcctgtgttacatgcccagacctgggacagggcagctggagtccatcctcgtcactccatgtggcgtggtggaaaagtgactcttccctgtatctcctcaaagaagaaattgagatgctcttaggcaaaggggggcaagtggctgctgcacccctctggccatttctcatgttttggcgtcatactggacgaggactggctggcaacagggagttctgtgtgtccctcagtcaccgtcctttttagctttctgcttgttgcttgcacattgccaatataaaaaaaaaaatctatcggagatatggacacttccattttctttgattttcctcctgacactttatctattggagtatgagctgcttcagaggctagacaaatatgccatctattttcaaaaataattgtggtttatttcccaaggaatcaataaggctctgggttgcacaggaatattgagtgcacgcgggctgcatgggcatcgcgtggggggagacaagaaacccctcacctggtgcctcacctggtccccacaaatctccctgacaccgagggaagcctgaggacagatgggcacaggaggccatgggccgagtcaccagccctgttcatcctgcatgcctctcttggagtcatctcaggccaaagaggtgtcttttaaaatggtcctccaggtcccaccactctcccaaaaggcctcatgcgacctgcccatgccttgccccggccccatcctgcccccttcttcatccttggcacctttctgaaacaccacctgcattctccctgttcttccaatgcagaatgcctgttccagctgcaggacctgtgttcctgcccctccctccacctggaatcttcctccaggtggtccctggggacttagctttactgggatctattcggagaggctgcccctgactatcccacctaaaacagccctcacatcccctgcaattatcttctttataaacttaacaatttcagaaatgaccctgttgggctccatcgcttatttgtctcccaccaaacagagtctaagatttgcacaggtggcaatattgtctatcttttgaattgctgtcatttctataaccccagggtctgcaagggcactttacacccagtaggggcagatgaatttatctgaaaggttgaatgacagaagaaatgctcaaataagtgagtgactcctcctgtcttccctgcattgttcaaggtggcgcagaggagtcaagggctgtagggaaagtggccccttccccagggaacacaggaacctatcagaaaccacagcctgacagtcaggctgcaagtgctggttgcttgggcatagacaaagtggaagatcctcttccccgggagttcagggagggggccttgcattctgaactcagggtctttgccctttgaacttctctgccagatagttgcatggcttgctgcttccccttcagagtctggctctgatgcccccttctctgtgaggcccacccacatggcagtggaccccccgccccaccaggactttctagaccgctttccttccctgtgtcacttctctccatagtgctcacagcatctgacacaccatgcatttgtatttcgttgttgtttctctccatgcactagactgtgaactccttgagagcaaaggctgtgtctgtttgtccagctgtgtccccagcctagaacagagcctggcccaggtaggcactcagaaagtatttgctgacccaggcattcctgcgtcaattcgtgaaagtgaccaggctcgaaggcagtcagcccagacatctggttttctcagatgatgccaatgtccattttcctccccagattggagccagggttgtggtggtggttgggcagggtggggacccgcagactgccaggatacgggaggtggtccacagggcacccatgcttgagctgcctgcaggagtgtggaaaccaggctaggcatgtcttgtcttgtgtatttcatgtcgacacagaaccctggaccacatttcccagccaggtggtaactctccatgggtaacgtcagccttgcagggtgtaagagtcagtgaggaaaggcggtgcctctcaacgaggggctccactaaccctgtcggcccaagaccagtcagcttcccggggggtaagagaagacactccacagaatatttccaggcaacttaggaccaaagctgacagaagttctggataacctgggagagagcaaatggttattgctcttcgcagttttcaagcttgagaaagactaatgtttctgaacttctgcttcacaaaccttggaatactcttcggagacattgagagagacaacatagggccatggacagaggcattctggaaacttcctagaatcagagagaaaatgaaagaagccatggaaacatcacaccacctccaccacccctcggaagcagcattcgccgtatgtaaaaggcagaatggtaaccagataaagatcaattacctttttatctaagaacaaagaagctggaaaatgcttacacttgtgcatttgaatagaacagaaagtgttacatgttataaatcacccaaataaacatctattatgacaatgtaaaagtgtagattacacaagtaattaaaaatcacaatcaacgtatttgttaataagtgatttcatgtgggactcaagttggtgagaggccctgactgcctctcttttggccctggtgtctctccttgctccaaataccatacagtttttgtatttctaaatgacatggccagaggacagcagtcttattacaaaacaaaaatacatgtactccaaaatgccatctttttgaagtttttaaaccatggacccatatgagcacatttaaaaacccaacgtgtaatataaatatatttttaattgggatatcagatggcaccttctctgtattttttctgtccgactgcatctttattggaagtctcgatcatgtaacatcaatggataaaacctctctcctttttctccccactgcattaactcaattactgtttctcttctcctaacacctgtttgttggagaggtgctgactagatgcaccagtcaggttgttctgaacatctgggagcccgagagagcctatgggtcactaggatgtttctgatgcaccctaagcttcagccaggtcctcaggggaccaaggggaggctgctgcaggatctcgggagtccctaaggccatcagatcctggaggctgcctcactctggctccaggcagggcagacgttgatggctgcttgacccagaggtggctgaacttctctcctcatggagacattaccctgggcagactagggtccaataactggatatggacaatttttattctacagcacagtgtctgtgattcaaattcagagcccattattgcaggctcagaaaggagattgcatcagtcagggttctccagagaaacagcaccgataggaaatgtatatatggccaggcacagtggctcatacctgtaatcccagcactttgggaggccgaggcgggaggattgtttgagcccaggagttcaagaccagcctgggccacatagtgagaccccatctctataaaaggaaagaaaggaaagaaaagaaaaggaaagaaagaaaagaaaagaaaaagaaaagaaaaggagatatgcaccccccccacacacacacacgcacacaggagatttataagaaattggctcaagtgattatggaggctgagaagtcctaagatccaagatctgtaattggtgagctggagactcaggagagctgatggtgtaaattccagttcaagtctgagccagaatgcagatcaatgtcccagctgaaagacagccaggcaaagcgagtgcactcccccttgctcagccttttgttctattcatgccttcaacggattggacaaggtgcacccacattggagagggccaccttctttactcagcccacccattcaaacgttcatctcatccagaaacacccccatggacacacccagaagaatccttaaccaaatatctgggcaccctgtggcccagtcaaattgacacacaaaaattaaccatcacagaaatacatcagcaaacatctagttgtaacatgcaatggggagggcgcatgtccccagagtctcctgagaggttggcaaatcatttcaggattggtctccatgcacccatgccattcttttcctccatgtcccctccctgtgcactaccttgggaagccaggtgcctgggggtactctggaaggtctgatgtatctgttttgtgtgtacaggaagcaggcagatgctgacaggtccctgaaagcctgggggaggcgtgaccccctggtgggtgagcacctcatgcgtggctgcgggactcctggctgggttccctaccgaggctctcccatgtgtgggtttttcgggatggggttgttgtctcaaggaatgaccattgtagagaaatgtaataagcaacttcactcgtgaaaacttggaggcatgaaagttcagggactaattaaaaataaatctcattagtttcttctccctctcgagttctgtgagtggtttattaatctggttttgatgtgccgcatgttccagccccgagtcgggaacctctttgtgggaatggatccgcacagggaagtcagtggtggtttcccagggatttcagctgtggtcacgaggggttcagcattgggctgaagggtacgcccggcaccccccaactcctggctgctgtcttcacggcacagctcctggatgctggctgggctctcacctgtattcttgtccctttcctataggaccaaggaggattgtggaagggagggcgttctcccttgcagcccccaaagggctgcacacccagtcgggtgtagggagggagacctggacattatcttgccttgtgactacaaagcctgacagcaactggctgaacacagaactcagcccgcagggatggagtaacggcacaataacagtgatggtagttcccacgttctatccacgcccatatgcaggctctgtgctagacactttgcattaactcgctccttcatccctacagcacctcagtcaccaaggctccatcccctgccccgcttcaggggagggcgctgagcctcagagacagagaggtgaagttatcccatcccggagttgtccaggcttggattaaaggttataatcagatctgcctaattcagaatctcattctcttcaccgctgcattgtattgctactttttacttttctgagtgaatttctggcttgttttagggaattaatgcaacatttctttgacagtgtgtgtccacaccatacccaacaggaaggaaagaagtgacttgtactcacaagtggtgttggcgcagcctccagggaatttaaaagggaagtactgtgcaccccagctcctccttgacccctccctcagactggccccaggccaggcttccttggccccacgtgcttgggtttccccactagcacagcgaggttaggggtgaggcatggccactgtggcatgtggaggcgctctgacctcctgggatggaaacggggtgggggtgagtgggagtggaatcacttccagcatcacagagctgataaactcatgctatggtggaaaccacctttcatcttcaaagtgcttcccgagcagtggctggtacataaacatgggtggaaatgaaacttccagccggccccatccaggtgccttatggctggtgtctacgtctcttacatttgatgcttctatgtaaggtatctaggctgttttcacacactgagtaaatataaaagcactttgcatacattttcaaaaaggaatcagttaaaatgggtgttcttctcatttccttttccaaaaagagagcatgcatttttgccgttagtgggggaccaaccacctgagtaatgatgaaaaaaaaaaaaaaatctccaaaaggagataagtctttttttctttttgttttgaattaaaattccatcatttttctatatctgagaggaactaaaagcccggtttattcctcctctgttccctatccttgcttttcctgccttaatgacatcctaaacttttgttgaaaataattgattgaatttaaatttccttaaaagttgaagaggtaatgttacagtataaatttcctaccaaacactaagtagggaaatatccattagtgaaattaactacagtttctaggtagctaacaatgtgctgtatacagtagggcatggctaatgaacactgcagtgggtgatatttcattatacaaattaatgctcacattttaatgggaaagtcacataatgaatctgggcttcagtgacagcaattagagacacagattgtccccttctggacaaggcactgtttagcaataagcagctgtgtgaaaagtcttcaggtttacaacatatatatgctttgggggaattagtgtacaatttatattaatgtactgaagctttgctgcaaagacaccaccatatttatctctcctggtgttaactaagtgaagagatggagaaggactaaataaatatcaaattgaggatgcaaatacaggaaaatattcagttgctcaacttaaaagtgaaacacttttggagatttagcaaaaaaaacaaaaacaaaataaaaaaacgagaagcatgaatcacatcttaaaccttaaaatggtttccaaagagaatatgaatccacctgttatttttggagaggtgctggtgggaacttgctctaaatagctctagaataactccctggaacagtgagggttcctttgacatatcaacagcaaagtagaggctcagaattataaaagatatgagcatgtaaaaataggtaccgtgaactaattaaaccacctggtcgtatatttctagaaattgatgatacagtgacttgggagaggttatcaatgatattctaaagctaaatctatatcttatgccatgtgtcagtgggaagctggcttactgtacgacagtgccaataatttcattaatcaattggaatgatgaactgcggccttttaatttcattatgccttttctagcaaaactcttctttctagaaattcattgtttgggcccacatcttactccttaaaatatagtgagaggtttccccgcagaaggctaccagtgttcgtagctgcttcctttagtgggcaaagagccccattctgcacatttcacaatgactgcctgctccagaccccatctgtaaaatagagcactgtgacccttcagtgtttgaaaagttttgagataggtactaatatttaaaaattaagatactgcacacagaaacctcatagatatgacacttttcttttttctagagacagggtctcactctatcccccaggttggtgtgcagtggtgcaatcatagctcattgcagcctccaactcctggactcaagcgatcctcctgcctcagcctcccaagtagcttagaccacaggtgtgtgacaccacacctgcttaatttttaaattttttgtagaaacgaggtctccctgtgttgcccatgctggtcttaaactcctgggcccaagtgatcttcctgcctggcctcccaaagtgctagggttacaggcctgagccaccatgcctggccgagacttttcttggaaaatcaaaggttctagtgcccacagttggttagagttgagtgacactgtgctccaggagagaacggctgttttgcatactcatctgatctgtgtggttctgcctgcatgcaagtgtgtggcacatataacagataaacacaaagcaatgaaccacaaacatcatggaggtcaccataggactcttgaccccctggaaaccttgggaggcagcctgagtggtcccctcagtagatgggactcatttatggcctaagtggccaatcactcaactagacagagctgctggcagggtctggggctgcctgtaccatggggctgcccaggcaatgcagacctgagtctcaggcagagtccagccttggttgggcagggctaggcaggcccaatgcctggctcttttggcatggatctggccatgtccggaggcctgggatttgctagagttagcccagagcgcttgggtagaagagcacatccagatgcagaggccttggctgggaagcggttctcagctcaggtagactcagcatctgcctgtgccggccaaatgaaagagcagatgtagaccgcaccccggagcctgtgaaatgtgctgttaggcctctccttgtggttgctgccccaccccgtctaggccaacgttgtaagtagtttgcctcctgagcactctgaaatgggccctctgaggaaagaatgcctgggaaacagctgggatgtttccagtggagcacaagaccctggggctgctggggctctaaggaggttcacagctcaacctctgggtgtgcctggctagaaacatgccctggccggggctcactttcatctccaaagccttcccctgtgccccttgttggataggaagcccggaaagggaagcgagggctttgagatagagggcaggggtggttcttccaatcatttagcgattacgaggaaattaaaattgagcttgtttctttgtgaacataagtccaaaggggaagggtttatcccctggaacagcgtgcccacctggagcacttaactgaggaactgggatgatcggaagaaaccacccaaaccaagccctttagcgacccggcaggaggtggaactgtatagagaaatggacagaaagagcaatgcagccctttcatcccagtgcagaaggcagaggaagcatgggtggagaactttctagaaccttgcatagcacgtgcattcagaaaacccttgaaagctcatgaagcagcccctaattcaccaggcctgggcccgtggagactccaatgctaggaattagcctttcttgtttctcagctctggcttttattctctggagcagtgagggccaaggcctattttgaactctaaagacagtgggtggagtgaagggatgctatcttcctgtgcactcgcatgctgtgtgtgagtgtgagagtgcgtgtgcgtgaactctgctagcctgctatatgatatgtctcctccaaaagccatgagagcagagaacctacctctttggtctttactcagtttccagggtcaagaagggaggtttcaggtgtttattcattcatccattggttcactccatcaaaaaaatgtgtgtgaatcaaactgaaggtttctgagtcagtgggtgacaagtatgtgcacaagtagcactggctctattcaggagacttagtttactcctaaacgagcttaggattggcgtgagaccccacagaacatgtgcttcaacatgtcttattacaggttgaggaagaaaaagtcccaagaccaggattctgtgtccagtggaattcagagtagcgtgggtgtccagtccctagtccagattctcaaatacctcctgaggtctagactgtcttccctgctaaaccattcatggttcccacttcaaaggcacttccaaggaaggctgcctacaatggttccccactcaggatccacagagggccacctgggaaagtcccgaaagatcccgaaaccaagtttgcatctttggccaattaactcagaatgtggggaggtgggaccaggtatcagcacttcatcaagcccccaaggcaattccaggatggtttttcaagggattgtctttacatgtctgcaccagaatcatagggacgcttacaaggccaacttctgcgccgaccccagacccagggaatcagaactgctgtgccttagggccagaactggtgtcttaccacactcccctggtggttctaatgcacaatacagtttaagtactacccgctcccatatgtcttttttttttttttttttttttttttttttgagatggagtcttgctctgtcgcccaggctggagtgcagtggcgccatctcggctcactgcaagctccgcctcccgggtttacgccattctcctgcctcagcctcccaagtagctgggactacaggcacccaccaccacgcccggctaattgtttgtatttttagtagagacggggtttcatcatgttagccaggatggtctcgatctcctgaccttgtgatcctcttgcctcggcctcccaaagtactgggattacaggtgtgagccactgcgcttggcctcctgtgtgcctttcaaacatgtatccattggaaatagacacacacatcctctgtgcatccccacagtccccacccagaaaggcagccctccacattcccaggcttgagaggaaagtccaccttccccctctttagctccgctaatgaatgcccgtgctttctctatggcccctttgcctgccagatgcacataatcatttccaggtgcatttctaaaacacagcctgagtcccaccaggcacctgcgggcctcacctctgcaggctttcatcgcctggccctcccgcagggcttgctctcactcgtagggcaggatcttgagtttctaggtaggcttgcctgctgtgggccccatcacaacccctctaagtttcggggactgcctctgttacacctgatcactgggcttccagataagctgaatcagccatgacatcctgctgcccagaagtgccccatcccagcctggcctgcgatgggatgtctacatagcagtagctcaatgagtctgagtctaacctgggactgactccaagaagggggaaattactgcctgaaattctctgtgcctttaccccaaaggggatagagacttcctcctagattcctgtcattggtctagctagagatgactgtgacctttacgtttagagaaacagattccctgctgggttcccttcctagacctaagggccacctctgaaaaagtgtccaggagagatctcagctgctcatagcaactggcacccttgttctgataaggcaggcagggtaaccacggttctggcacgtgatctggagatgacatggcatctcctgctcagaaccaggctggtggccctcttgctcacaaagtccacgcccccaaatgccctgtgcctggagaactgggactcatgccttccgctgagactagacacagtgaaatgtcttcagaagacaccattcactgacgatttgttgttactttttagatcagtctattttacaatagaacagaggaaggggagggggaatagttgaggttcctggaagaaataattgtggatattgacagggcaccattgtgaataagagagcggggactgtcacagtccccattccttccagagagccttttgattgcaaagtctggaaaagacctgggattgctaacaaattcttggaatatatttaaatctgcagtcgtttaccttcttccccttctctatcccacaatgccagcaaatgtaagttgtctcttctggtatctttttccaccgtggaaagaacaatagaagttgggggtgttgaatttaaataaatatttaattcatgaaaattatcttatatgttttaaaacactctttaaagctatttttattctctagaaagcgcttattataggtaaattacacattttactaccggagcattaggtttgccattagtacaaatttaaggcactacaaagaccagtagataatgttaatttcaaatacagaaactaaatatattttgtgcctttttattactcattttcttttaagttttattgactgctttttatcttaactatatgtctttacatgctgcaatcataatgcactgtaatggtattaatattttatagaatatgtatttatagttctttatttagaaacagtgcagtaggtctgcagatatctgagcccgtctggaatggtgccctccaaataatgataaattacttgtgcagtatgccatttgctaattatatccatgatttactgcagagcaagacttaaatcattcatttcagtcttgcgtaacagtgccataaaatttttaggtttaaaaatggtttccatgtgtataatttaaacaaattttagatctattgtatacacaaaatattgcaaccacccatttgttacatactttctctttttaaacttctacttttaatgatcactgtggctgaaattattatgcttaattttcataatcatagcttttaaatctacagccgttttcacatgttagataaagaaaaagatagctaattgtgtgtagatagtatgtcattcctgaatagtcccaaatggtacaaaatcattaaaaaagcttaagagtacgaattattcttctattaaaaaacagttgttctctaattattagtttgagctgctttgtttcaaagaacaaatgttgatccttccagcctcgttcagcacaccaaaatgagataaacgcctcttttttttcttatatcaaaatcttgcaggtgagaaaccctacaagtgtccgcactgtgactatgccggcacgcagtcagcatccttaaaataccacttagagcgacaccatcgggagcggcagaacggggctgggccgctgtctgggcaacccccaaatcaagaccacaaggatgagatgtcaagcaaagcttctctgttcatcaggccagacatcctgaggggggccttcaagggtctccctggaatcgacttcagaggaggccctgcatctcagcagtggacatcaggggttctctcctctggagatcactcggggcaggccacgggcatgtcttcggaggtcccctcagatgctctgaaaggcactgaccttccttccaaaagcacccacttctctgagatcggaagagcttatcaaagcattgtgagcaacggtgtgaatttccaagggtccttgcaagctttcatggacagttttgtcctcagttccttgaagaaggagaaggacatgaaggacaaagccctggctgaccccccttccatgaaagtccacggagtggatggtggtgaggagaaacccagtggcaagtcctcccagaggaagtccgagaaatctcagtatgaacccctggacttgtctgtgcggccagatgccgcctccctcccgggctcctcggtaactgtgcaggacagcattgcatggcacggctgcttgttttgtgctttcacaacgtcctccatggagctcatggcccttcatctccaggccaaccacctgggcaaagcgaaacgcaaagataacaccatcggggtcacagtcaactgcaaagaccaagcccgggaggcgagtaagatggccctgctgccctcgttacaatcaaacaaagacctgggcctctccaatatgatcagctctctagactctgcttctgagaagatggcccaaggtcagctcaaggagactctgggagagcagaagagcggtgcatggaccggccacgtggaccctgcattttgtaacttcccatcagacttctacaagcagtttggtgtttacccaggcatggttggctcaggggcctccagttcctgccccaacaaggagcctgatggaaaggcccactctgaagaggatgtccccatcctgatccccgaaaccacgagtaagaacactactgatgacctctctgacattgcctcctcagaggacatggactcctccaagggggagaacaacgatgaagaggatgttgaaaccgaaccggaaatgatgaccaagccactgtctgccctcagcaaagacagcagcagcgatggcggggacagcctgcagcccacaggcacctcccagcccgtccagggactggtctcacctttatcccaagcaccggagaagcagtggcacagccagggtcttctccaagcccaggaccccttggcgggcctgccaaagccggagcgggggccccagagcctggacaagccgatgaacatgctgtcggtcctcagggcctacagttctgatggcttagcagcctttaacggacttgcaagtagcacagcaaattctggatgtatcaagaggccagacttgtgtggtaagttttagaatcctcttcctatagttcatttcccaaaacatcagtgctgaattgtgcatttaaaaaaatgaggtagacttatccatgagcaacttttgaatgaaatatttgaaaaaaccctcaatgctgtatctgcaatgtagacaatcataaaagtccattttgtttagaagttttagaactcatacttttgtgttctaatttgcattataatgtactaaaatgcctgtacagaaggcatggaaaagggggtggtcgctcaccatgtgaactactcctgtttgccatctagaacttgaaggggggaaaatcgacttacaaaacaaaaatgaaaagagacatggtaacttgcaaattcttcagtattttcaatttatgcaaaagatgcctaaagacaattccttactgctttgctaagccaaatctgctttcttaaacttttcttttattgacttagaggatactaaaatcatatcacactaacaacagtatggaaataaagcgaccttctctccaaagagggagatggtttctgggtgtttgtgactcatttttagacaaaccaaatggcagttactgtgactttggccttctgcgcttgccttctgtttgtctgtctgttcacctgtctgtctgttgctctaacaagacatgtacattgtgaagtccctgaacagtagtggtgtgaccctgtgcatcttggattcatgcttgtctgatcctgtagcaaactgacacttctttatctccttaaagcatatgggtaccccaaaggaattccagatttccgaacatcattgtaagtttaaggactaggtttggatcaaatgaatgtttgggtgggcagggggaatcaaagtcattgtcttggcaccctgatatctgtatttggaagcctttctccgaaaagaagctccatgcattcttccctttgaaaccagctccaaatatcctcaccagagacaaatgaccatgatacatttccaactgtaatttatgaatggatttctgtaattttacttcacctgtggaaggaaggcaggaaggcaggaaggcaggaagggaggagggcaggatggaaagaaggaaggaaggaagggaagggaaggaaagaaaagggaaggaagggggggaaatagaagagagtatttttgaacctcaacatcctgttgttcgtttaagcacagagaagaattcaggaagctagactctgggttcataatttagattgatatatttcttttattcctcttcttccctaattcactaggaactgaatcaagcggtcagaaatatttttttgaattgtcgaaaatcactaaatggatttctgacagctcaaaaaaatattgacagttccttatgctgaatgattcacaaggccccattaaccactacccccagatctatttttagccacatacaattcattacttttgaagctgttaaaaacaatatttaaaagaagggaaaaaagcgttttatgttagtccaaattttttccccttttttttttaaactgggggagcaatgttgaaggcttttttttctttttttcattgttgttttaggtttgtgatcggggtggtttcttttttattgttgtttagagtcttttttttttttaagtctattttcagttctttcaactacctacgtaggaccatagtccctgccaggaatccatgcatcagaaaagatcaaaacctggcatgttcatgagctcattattattgaaatgagctcatattacccctattaattttcccatcttcctatcagtaatgaaggaaggctgcctggctcgaggaagtttgcccagtggtatcctttcgcaccaggcgaggttgaatgggaagccaacgtcagggagcctgccgggtcttgagagccttttatctctgggctgcaagctcctaggaacttctcaccttttcccaaaacagcagcacacgacacgtccctgacatttccccgctatgtgcaaaccgtgttgcccagtccacccttcagcctttgggcagcagatcctgggatgtaagttgtgccccccacccctcgcctctttcatggggcttggggaccctcatgtcagccaagcttgaaggcttcctggttgcttctgcagcagagggttcaggccccttgttccgccttccactcctgggaagatgctgaaattgactctggccacgagctgcctatttttagagagtgtgagttctgcattccatttggccccatttcttctgtgtcctcttgctttagtttggaagtaggcaggaaaagaccctccctggctcttgcatttgcttgggggtggggccactgccctcttgcctctaggatgggcctgactctgccagttctcatcccactccccccatatctggcccaccataattgcagtcctcttcttattttcttgcgggctactgtgatatcccagaaggtccagacatattcatcctttctaaaagttacaacctaggaggaacacaaatccaaatgggctgttttttttttcttaaatagtgtaattcactctctttttagcatggcaagaagcacaagtgacatttgtaagcttcaaacccccactagcttccctttgcaagggtagaagtgatattagcacaatgaataaaatatttctaatgtttattcctccttctcttcttcactcaaagtaggtatgggtttctaaatccgcctaccaggctgatcactatttctccttaagaatctgggctttgtcagaccaaagcatcattcctagatttctcatctcagatggataaagttgagggctggttttgtctggttagtagacctaaatccccactttcatgattatagaaacaggcttataggaggagctaatgttcccatgtttcttaaggaagggctctgttctcaaggggtgtaaaagtgtttgaacaagcatcagaaatacctagttcaaatcatataaactccccacagatctcagcagctcctccaacccttgctgttgatttggagaaggtggcatctcaccctattctgtgggtgatactcatattgcaggctgtactttcaggatcttccatcatttctgcatgccttcttcctaacttttaaaactctggtcctaaattccttggtgccatagagccagggtcctggccagtgtgccctgcccatcctaacagccaatggattcctaactctggtgcagaaggagagccaccgaggggagaagccgacccagccagttgggtggggagacgcctgttgcatatgacagtgtcgagagcttcagtgggaattttctaaagctctttccacagaggacagcacacggcctgtcagagacatattacaataatcccaaggaagaggttaagccatcttggattaagccagaggacaggcatctttgcttccacagtgggtcagatcccactaggggtctgatctcattataggaaatcccactccaatcaaatccttagtttcttgaggtgacttccagtctccaggcatgggtcacatgtctttattctgtcaaagagcataatgtacaagggtactccagtgccatcggagaatttggatatgcccttggttttattggaatgtttgaccttggttttgtaatgggatagactccacatgagtatttaaaggtggagaggggaagaccagagcagtgtttgcatccatggacaaagcaaggcagataagcccagtctagtctgagaaatgctaatgcactgttgggtcggcacttggctgggaaggggcaggcttccctgtgcacacagcaccaaggctggtctgcacagcacccatggggcccactgcatggaacggttaaaaagtgtgtttcatctgggagtttgtggatttggacagcaaccagatcacccttactccttgcctttcaaacctaagagagatggccagggtgtggagttgttgtgtgccaggtctcccagtcaggctttgcactgtgtcctttggtggacccaggggtaggcaggacagagaagaatgaatgacagatgaacgggaaagcagggaaaagagcacactcccctttgccccaaggagctctgctctgtagtgactgccactcagggaaggctggctgaactggtagcatctgtaagcaggctgagggcaggcactgcggctcacacctgtaatcccagcactctgggaggctgaggcaggggcgttgcataagcccaggagttcaaggccactgtgagctaggatcatgacattgcactcgagcctgggtgacagagtgaaaccccttctgtaaaataaacatgaaataaatatcagcaagttgattgtgggcacgaggccctatgtgcagtggctaccagacctagtgacccagtgggcctgggaggaagtgagggagaatgcaagcccattaacagcagtcatcctaacatccccagcttatcatcctcaggttattgggcaactggcttccccaacccaaattatacctgagactatggaataaaggtcttctgggcttccacattagtgaaataattgggacccccccccctcccaagaattcgggtccattgaaacctattcaaattacatatttttatgtgtgatgagatgaaccaggacaaccaaagctgaactctcttaaaatgtgacttatcttttccctaagccttatagatttcttggcataggcagtcggagaatacctacttttttttttttttttttttttttggagatggagttttgctctgttgcctgggctggagtgcagtgtgcgatctcggctcacggcaacttccgtctcctgggttcaagcgattctcctgcctgtctcccaagtagctgggattacaggtgcacgccaccacacctggctaattttgtatttttagtagagacagggtttcatcatgttggtcaggctggtcttgaacttctgacctcaggtgatccgcccacctcagcctcccaaagtgctgggattataggcatgagccaccgcgcctggccaatacctacccttttacgagctactcagtctaaagcaacaggcagcaaatattttcttaaagggccagagaataaaagtgttggctcacaggccatggggtgtctgtggcgaccacccaactccgctttggaagtagcaccacagctaccatagacaataggaaaatgatggctgtggttgcgttctattacaactttaggtactgacaggcgatgcactggaattggcccacagggtcttatttggtcaacccctgctctggtgtaaagagggatgtgttcccgtggtcatccctagggaatgagtggtgcaaacactggtcctctgttattctgctggacagtgagatggtgatgggagacccctcatcatcagtggcagggccccatccattgtctggtaatgccaaagccagagatgtgagagagactttacagtggtagaggacttgttgacccagatgggccgatgccttgtttctgggaagccacacctctgtctatgcattaaagacttccaggagaacaccccagcacagtgcaacccagagctgccccctcatagccagcacacacagaagaggaagcgggcagtggctgtgtgttgtctctgatgcaagcttgctctgtgaaagcctgtttcctcactgatggaaggaagcgtagggatgaaatagatgatagagataaaagagcttggatcagtgcttctcagttgagtttgcatgacgtcgtggagctcagcatccacgtgaaactgttgcaaggaaatgatgtcagtgtgcaaacatcttcgggtcacaatcgtcccttaagcacggcaggcatcaaccttacctccatcagtgttagagaggcacgtttcatttcctcacttctgccgtgatgcatggttgatagctctttcttggtatgtggagaagtttgctttgaagatgattctggcaattttgtgatgacctcccatcccaatggttacactatttctgtgtccactccattctcttcctgataccaggcaagtgcttgggggtaggaaatgagtcctgccctgcctcagtctttgaccaagaaacggcaaaggtctgcagtcaattagagacttggaaggaagccatggctggggtatgaaatacacagtgagggccgcatatgtgcagacaccctgagtataggctgtgatacacaggctatggccattggtacatttttcatcttgtgcaagagtctacagtgtggcccagaagccagcaggttctaatgaagaagggaggtgaaggtaggaaaatggcataggaagacaaccacaaaatcccaatctgccgagtgtgtgggagtgcaggctgtacccagccagcacaagaaggcaattggcttgagggtgtgggagacctggggcatctccactgcaagatctttttgtctctgttgctgccttactttattcaaagacaaatgtgctctcatacctcttccttctcttttttgtgagctgattctcacatggattggcctcagagactatggataaagcacacctttgcattcacctcctttgcccaattggataatttacagattagctattgacctctatggtctggcctgctctcatttgtactgtgtgtccggggcctgacattagaccccaggagggaggaccatttggcctgccttgaagtccaagggcagaaccttgtgagttaatgcaaatcaccgccctgttctgcccctgctggctgcctcacaacctgctgcagagcttttctgtttgactctggagggacaaacacaggcgatgtcccctaggatctcttgcagaaatcagcacctggagtgggctctccccagccctcatcctgagccctgctgtgtgcactgtgtctgatggagaggcagcctctctggatggcagctctctccatattccaaaggcattcttctcctgttctccttccctctttttaaattaaatgggaatgccactgacgtgatgtcgtttgcactgcaggatgacagaactgttgtgtgaataccattgtatttgccaaatggtccactcgtcatttcagaacaaacaaatggatggtgtctgtaagtcggcaaacactggtgacatttagccttgtttatgttcctttccttttgctgcatatttttggctccaaaagctactggctgaatcaacagggcctctgaatcaggagagaagtctggtagcattaattttagttgctatgtccatattctcttcagactgcatgaatcctactgctcaggaccaagtctaggtgagaggagagggcaatcaacctctttggtttcggatgttgtgtgcaaagcccagggttcaaataagcagtaattatctcctattacttagtgctgatcaacagcacctctacgtctaattgccaacctgccctaatcatgttgactattcttgctttagccagagacagaaggaccaaattttataaataacactttattgtcattattccattaaacgattaggggatgtggccctgcccttgctttcaaatgcctctagccctgatggtttctggattatttaataaatctgcacattttcttgcaggtaagtgacactccctgtcctagtcggtctatctggacttgcccttgtctgttcgtggtcctcggtggttatctgcagcttgttaatcgtgtaaagtcaagagaagaatgtatacacatatgtgtgttgaataattactattggcataggtatgtgtatacacacggtgcaccaatctacagtatatatagcagagaatcagaggctaaaaatattaccccatatgttccagtattagtcatggattgcaaaggcttagtaacttgagcaggagagaaaactccctcaaagtcataaatcctgagtgacaactgctgctggatgacagatcccttcacctgtggacaacctggctgggggtggggggctgttccaccagctcacctgagcatgtagaggtgggtcctgcagtggtctcgtgggtattactgcttgtgtctgattgtcctgtattttgtaacactttagaagaatacagaaaagtgcagtaattctctttctccatagtatttaagcagaaatattgctagtttaatattgtgtcaggtcgtcctattaaccaggagcagatgacagtaaaatttcagtgaatagcaccttgacatctacaacttaaaaatggtgattgaagcaaaatatgtaaacttgtacggggtgatcgtgtgctttggaacagagtattgttgaagtaattagaagatatattaaggtgttcctggtaatgaaggcatgtaagttataataattgtagctttctgaataagtgtcaaactatatctttaagtgtgctgtatgctgagttacaagttaggtcatttatgaatggaatgtaaaataatactaaaaatgcttcaataacttatcttggtattgctaataaaaaaaaaaagctgtgaaacattagtgcagtttggagtcattatgttaattcattccgcaacatccccctcaccccgacattcttctcactgttggaagcctcaacaggacattcagggaatgccattgaccctgcttcttgggctgtttgccggggcagatcattgcatttttctatccactcttaggtgggccctgtgagtaacaattcataaacatgcaagtggaaaaggaccttccaatttgggtggatgactgtggggggtgggggagagccaggcgacacgggcccgtttctctgtacaagtgacttttaggtgtctagaccccacaaccgcccagaggaactgtggctggggtggtgggggtggagggtacttgggcacggagtatgccggccatcatgccccatcccagatgtggaaacgctgacacccagcctcccttcagcaaatctgaacatgttcttttcatcctgcgaaggggtagtttgtaatgaagagactcaggattcgcggaggtgggaatctttatgttctgctgaccttttcggactgtacttgtgtttgctgtaacaggcttttgcctgttgttccactttgcctcctggtggggagagaggtgtgggaagaaccgattttgctttttgcttgtgttgcttggttttgtggtccgtgagctggacttgagggtcctgccatttcaacggtgtttccaagcttctttgcttggatgtgttttgtaaatttctaaattcaatgaccatccctgagcccttgtctaactggtccttttgggggactgggggtaggacacaatctcataggacacaatctcaagctccaagtccgttcttcacaaccccaaataaataaagtgtcctctgtgtaacaagggaatggaaacccagaaatgctcattgaacaaccctggcctccgcaacaggacaattgcatcaccctagctggttgaaacatttcttccggtatttctcataaaaccttttcaagtgactctgactccaaagaccacagtatggcattaggttgtcttttattttgggaaagaggtaaaaagtgagagattcggagtctgagaagacacgataaaagcttcaaagagaaaatgtcgattgtgaagaaggttgtcagatttcctggtggtcagtgcccacgactgttgcctgattcccttcatatgaagctgggagcacataccatgggttcctttggaaactgtgatggatccctaaatgcctagcaaaggtaaagtgaatgaccctaacctccaggccccaggtctgtgtggccacatttaggcagggccagtttccactgccagtgtatataggccaagcctgtacaagaagtagggccccaggagaggtttttctttatttgcaatgtcccctgagtctaaggacctgccccaaggggaatggggtgcacatcgagggaaaaattcctccaagcctttttctcggggcctctgtccagggctgagcacactgttcctggcgttgc

SEQ ID NO: 687 - DNA, 345808 bp, Homo sapiens
  source 1..345808: mol_type = genomic DNA
aaaacctaagttagagaaactcactcgccgtagcagacggcagcccagtagccaagcctggagctctgctgcgtttgtgcattctgctccgtttcacgaatcacaggcaaatcgttactcagagtaaactaaagccgcatcaaagcttcaggaaggggctggcaaggtagtgtacttacggaaaggctaccaggacgggaggcgatacaacttgtcagggagggtctctaaggttccccgggtggtaacaagcatttaaaaaggcgatgtggattcagacggcctcctccccacagcatcccagacaaagccgggctaggccccggggcgctcctggtgcacctgcaatgcggatccctcgccctgcgatcccaccccggggcagacaggagcgccccgggaccggcctctcctcccccttggcactggggtgggcgcgcgccgcggccggtccgcaccctggactggagcccgggccggggagccccctccccagaaagggccggcagaccccgcgggggcgggcgcgggggtcgccgagcctcagggaccctctttccccgactccgccgtctcccgagttgccttcgcccggggccacccctgcccctgggggagctaacgtggctcccaagccccggaggtggggcaggaggaccccgtcccccgtctcccggcggggagggtttttaaagtcttcgccacgaactcccgtccctgcccggcccctccgcccctgcccggcccctccgcccccgccggcgctgccaggtgagcggggccggactcgacacaccccgggccccgcctcacctgcgggcgccgccgtcgcgttccttcaggcggctgccctcttaggctcggtcctcccggcgggcggcggtgggggcccgtggcccatgggctgggcggggcgcggcgggcggggctgcctgggctcgggcgctgcccgggccgggccgccgagggaggtcagtgggcaccgcccgcccggcgcatctcgcccgctcccaccccagcgctagccgcggtgcaccctgggagcggggccggcggcgaggcctggccgcgctgacccggcgggctaggcgccggcgcggcggcgggcctgtgtctgccgggctgggcgggggcggcgggccgatattcacttggcgaggcggggctacgcccccttccgcccggctgtggcggggcaggggcgaaggccgaggggaagggagggtcgggcccgcgggacgcaggcgcacagctcaggtgcggccgcactgcggttgccctgggtaacgcggcccgagggaggggggggcgcggggaggagcgagggaggcgagcgggagcgcgcgcgccgggcgctggggtgggggatggccgggcccgaccgggccggggctggggggcgggggcggaggcgggcggtgggggcgcgggccgggtggccgcgcatgcgtgcggcccccgctcccccggggcttccccggcctcgtgcgtgcgcacgcgcgctgtcccccggaggcgtctgggtgtgcggagcgcgcgcgcgcgcggctcggaggcgcacctgtgaggtgtccctgaggagagggaggtgggtgcgcggcgcccgcggcctggggcgctgactcccctcacttggagtgagttctcggcggccgggctgcagtctttctttctttcccggagggaggcgggggccgggggccagggagcgggctgggggtgggaaggaggtggagtggcttaaagaaaagaaaaacaacccatcccggaggatgggcctcgggatggcggggaaggtcagagcggctccgcgcagcctggcgggtcccgggctgagaagccgcccctcgggcctcgggcggtcggccgcgggcccgcagtgcgggggagcggggccggggggcgcagatggcggccggtgcgagcgagggctgggcagcgggcagggcgaggccgggcgaggcccctcgggagccggactcccgagccaggctccattgttgttggagccgagggaagggggagcgctgccgccctcgtcgcccgtggagccgcgtcttggagcccttccaggcgggtcccgggagaggcggtcatggccgcgccaggggaccggggagccgggcggctgcggaggagccggctgcatggggtgctgtgtgtttttcagggcgccctgcgtccggcagaggaggcgagcatcccgctcaggtgatgaggaacccctcgcgcacccagcgcagaaggctgctgccgccggacgcctccattgtttgaccacaacaagggccggattctcacccaggtaaaccggctgccggcgctgtccacttccctctgactcccgcctccgcaggcgttctcaccccttccaggactcgactgcagttttctcactgtccccggcttctcatgaactccgtataccccctcccagacattttcccgtccggatccatctctccgccacatcacctctcatttcccccagaactcagctcctttgtgaaacctttcttgccgaactctaacaactaaatctccccgggagcctgctccgaactgaactgttctggttgctagattgcttacgggctgtcttattgcaacaaaggagaccagataccgaaaaaagatttctgagctattgccttcttcaaggaacgttttctgatatttacagtttattgttttcacaggctggaacggtttttaggcattttggcttcttatttagagagggctcctatttccttcatagacgcatagttttttagagcaggaaattgaccttgttcaacccgcaggttaattaaaaatttaaaaattaattctaaattagcagagtagtacattttctttgtaaaaacagcatatcacagagatggcattttgtctttgactatcaacctctgtcttcagggatgccgactattatgtgtgtggtgtttatccttctagatcttttggagtacttttacgtgtgtgcacttaacatcatttttgactgctttaacaaggactgttgcaccgtaactttcaatgttagcatgtaatgcttcaagtcattttttaacaactgctgcaccatgttccatagtttcagtatatcatggtttagccatttcccaaattgatagcagtttaagttttaactttaaaacagcttttttgctggtggtggttctctgatgagatgaaatttcggtgataggagcacagatctacgctaattatcgagattcggcatttatgatgaagttctcttttggttaagaaattgatatgtggaagcagccacccctcccctatggtagttctgactctagcagttagaagttgtgtgaccttggggaggacattgaatcacaccaaacctcggttttcttttctgtaaatggcctgctctgtctgctccatagagttcagtgatacagtgcgtatgtgttgtggaatgtaaagtagtatatataaaggttggttttattagcctttgtgatccaaaaattatttgcaatatcatttatattttttgaccagatgtgtgtgtatcatatcacagagcactacagatagtcaactttgaatgctttttaatttgtgactttttaaattaatttttatcaagtactgacaatacattagtcttcttaacaatattttgcaaagcattttttcctagggctttcttttcttcctcttcattaaaaaaaaaaaaaaagagagagagatagggtctctttctgttgccgtggctggagtgtagtggcatgattctagttcactgcagcctgggactcctgggctcaagtgatccttgtgcctcagcctccccagtagttaggaatgactacaaccatgtgccaccacacctggctgatttattttatttttgtaatgacaggctcttactatcttgccccaactggtctcaaactcctggcctaaagcagtcctcccaaagtgttgggattacaggtgtgagccactgtgcccagcccctagtggttttacataccttaaaaaataaggcatataaattagttgactgtgaataaacatattagcaaactgaacactagacaatactcgcactataatatttaagcttatttccttagagttgtaagttgtacatgtatttttctgtggcagcagcagattcagattagcttttatgtccttcagggaaaagggattgttactaaatttgcaggctgcatcagagttttaatattgagatttaatattttaatcatttgaataatgattgaatgatgtgatgggtaacattttaagatgtatgagatacgattaggggctttttatgtatttttctttctttcagatatatatgagtgcctgtagtgtggccagcaaaatcaacttattttgttctcttgaagcttatgatttgtgagggggattggaatttaaacacaatcacaactacacgtatgatcacaaactggtatctgctgtgaaagttaagaagcacctgctatgagggagtataaaaaaggggagaccaaattttagagtggagagaaggggcctaggaaagacttttctgtataaataagatttaagctgagatttgaagagtgcgtaggtgttagtgtggaggaaagtgggggataattttccaggcagaggaacagcatgtgggaaggcctcaaagtggggaaaaagctttgcccattccaggaactgaaagaatgaatgtggatagactatggaggtgaaggggaagagtggctaggccaggggccagatcaagtagggtcatgtagggcaggttaaagtggttgtattttatcccgagtgaaatgggaaaccatgatatgggttgggatttacgaagaggagtgacataatcagatttgtatctttaaacagccactctagtcgttgcatgcaagatgtgggggcgtgttgggggtggagagtagaagtggggagaccaggttggccatctcagagggctgcctggaagagacgtgagctttcccttggaattcacattgacctcacgttaccagctacactaaggtcaaatcaatgtttgattaaaaaaaaaaaagatcctggccatgcacagtggctcacacctgtaatcccagcactttgggaggcaggtggatcatgaggtcaggagaccgagaccatcctggctaacacggtgaaaccctgtctctactaaaaatacaaaaaattagctgggcgtggtggcaggcacccgtattcccagctactcgggaggctgaggcaggagaatggcgtgaacccgggaggtggagcttgcagtgagcggagatcatgccactgcactccagcctgggcaacagagggagactgtctcacaaaacaaacaaaacccccacaaatccttgtttctaatttttaagaagtggggataaataaaagcaataaaaaggtacttggtatgcaaaaagtacacataaatgttaaactagttgtctatacttaaaagtatcagagagtcaaattaaaaattgggacattatttaacaaggtttgtatgttttgacaaagcggtaatatgtgagataggagtgaagtgaggctctaaaatgaagggaaatatttgtagatgctattgactatgaaaacaataacaaaaattattagacaaaaaaattgatggagtgaccatgtattagtatatgtataaaattaatagctttctgaataccagaaataacctactagaacctaaaatggccaaaaaaaaaaaaaaaaaaccctaaacaagaaactggctctgaccaggttgcagcaaaacaagtgaaccgtgtaggcacaaccttatagagtcaagtgtgcactctgtggaggagaccataaagtatcctgaaaggtctgaaggggtaccttgaacggaaagagaggccatcttccgggctgtgatgtctgcatgttatggagatgctcattttggggtgaacgtggtagaatacttatgagtaatgaggtgagacaaatatatttaaacatattatagagccacattcattaaaacagtatcgttctggctgtaaaatatccatacaggtcaatggaacttattcagcaccccagaaataaacttttttatatggaaatgtcataaataataatgaaatcatcacaaatgccccctgagtctaaagaaaatgtaagtaaatattaaacatctggaaagaggagttttacatgctaaggtggatggagcacatgctttagactcagatgtgtctaaactggaatcttttaagtgaggaaaattatccccactttgcaggtgttatgagagtaagagataaagggccaggcacctacagggcactcaaatctgtaagtagctgctgctattagaaacaatagagaaaataataattaaaaattagtgtattagactacataaaaatttattctttaggaagagaagggaaaaaaaaaacccgaatcataaagtggaaaatatttgtggcaaatgataagctaagagttagtattttcaatatgcaaagaactcatccaaattggtgaagaaaataatgaagatccacacacaggtggttataggatgtgaatagacagttcgctggatagaaatataacttgtgaaacattggaaaagctgtgtaattcattaataatcaaatcactaattaccgtatagaaaagttagattctgttctgaatagcagcaaaactagaaaacatttacaagtaagacataaatgtaccaaagctttatgaagagaagtaaaaacttttacctaaatgatttaaaagctaacctaaataaatgggcagacttgttcctggaggggaaggcatcattgtagattgcagtacctccaaattaaactatgatttcaatgtaattacaattgaaatcccagtgggaattcttctggacactagataaattgcttctaaaactcttttataggagtaaatgtcctagaatggccaaaaaatgacaaacgtttttaatggaaaagtagtgttgggggatttgctatatgagaagtcaaagcatactgaaatgctgcagtaatataaatggtgaacacaagaatagacagattgacgcctggagcaaagtagaatccagtaacagacccatttttatatcagaatttagtatatgataaagttggtgttttgcaacagttgggaaattataattcagtgtgttgtatagggataagtggctctttatttagaaagaaagatcctacttcacattcaaaataacttagatggattaaggaactaactaaaaaaacctataaaagcattagaaggaaatataagagaatttgttatgtagaaggatacactggaaatgatgtgttttaggtaggccatttaggtaagaccaagacctaaaatcataaatgaaaggattgataaatttgactataatcacagttgataattctgtgacaaaaagcgttacagagtgacagactgggaaaacaacctgtagcatgtataaagaataaatagaattaacaaattaggtaatgaattgaggatatgaatagttcttagataaatgtgttcaaacagtgaagagaaattcaacctcattgtgattaagagaatggaaatttaaaaactagatttttttgttgggaggagggcatcaggcaaaaattaaaaactatccagcgatgtaaaagaggcacctaatacattgttgggacataaaatttttccaagtttttagatggcaattttggcagaattttatcaaaataaaagtacacgttgatttagcagctacacttcaaggaatctgtgctattttcataggagaacatacgttaatataaacaatgtctattgcagcgtcatttataatgaaaaattgaagataatcacaataaattttggtacccatatactgtggaatatcaagtagcgttttgttttttgtgggattttttgtttgttttgttttgagacagggtcttgctctgttgcctaggctggagtgcagtggtacggaatgtggttcagtgtagcctcagcctcctgggctcaagtgatctgcctcagcctctcaagtagctgggaccacacacacacacacacaccactacacctggctgatttttaaattttttttgtagagacggagtctcaccacgttacccaggccagtcttgaactcctggcctcaagtgatcctcccgccttggcctcccaaagtgttgggattacaggcatgagccaccatgtctagcctattagttttttatatagagaggtagatttgtatgtactgacatagcctgtatggatgtctagaatatactgttgagccaaaaaagcaagcttaatctcattttttgtaagatacaaaacaaaataatgaagggtgagtgtgtgtatatatatatattctgaataagaattagaaaaagactagaatacctgaaaacatttaattctgattacttcatgggaaaagcctaggggagactggtttttcatatcacatgtgtttgcattgcttcagttttttttacaatgggcatttacttttgtaaggaagatgttacaatttctcaccaatttcatgaaggtctagatttagacaaaaatatacagtgcctagtacctaaaaggatgtggtaaaaatgacacactcttatgttacattggccatatgtgtcaagagtcttaaaattatttacatttcttgatggtctaggaaccatcaaaagaatatttttaaatacagagaaaagctttctgcacaaaatatgtatattgtagaattatatttatgggcacagtttgcagaatggttatgatacatcccctatatcatatatttagtggcaaataacattgccattaaaaacgtttatgaagaaaatatattaaaatgcttatgatagtgttaagtggaaggaaatcaggatacacaattgtatacctgatatgatgaaaacgccccaaaaaaagtcccagcagccttccagtaaaacctatgaatggcaaaaatatgtagaagaaattagatggaaatcttaagaattgtggaattcggtaggatgtcgggtgatttaaataatcttttttgtatttgccaagattacatgtacctgtattacatgtatgatggaacatttgatttaacaaagtatatctgggacatgatagctacatggcaaatagacatgagcacttttttttttggttaaagccaatgaataaatttggaatttacactgaaaatgattgggacccattgaaaacttgtgagtagggtaagaacaatccattttgcattttagaaggttacattagagtagataatggattagagggaagcaagactggaggcttttgtagaattccagggaagatgatggtggcttgagttaagttgagacaatgcaggtacacagtggagagtttccagaggtatttggaagagagtggctagacctttgtgatggggggaagtcaatgatattgacttgggcaattgaggggagagtggactcatttactatagttgggaattggctatggtttgaatatttgtcccctccaaaactcatgttgaaacttaatccccaatgtgacagtgttgagaggtggggcctttcagaggtttggctcatgagggcagagccattcatagattaatgggttgtcatgggaggggacctgggggctttataaaaagaaaagagatctgagacagcatgttaacatgctcagccccctctcatcgtgtgatgccctgtgccggctcagggctctttggagagtccccaccagcaggagagctgtcaccagatgtggtcctgggctttttcagcctccataactgtaagagataaatttcttcataaattatccagtttcaggtattctcttgtaagcaatagaaaacagattaagacaggaatatagtaggctttggtgaggaagtgactgattcagttttggatgtacttgagtttgaaggtcttataggacacataggtgtgtcacgaagaggatttacaaagaataattttacagtacacatgttttgctgtaagaatgactagatactatacatagctatggtattaaaatcaatatttctacatggtaaatttttcttgcaatatagttgtacttctgtaaattggggcatatctgtctagatagactggaccattgatatttttcacatagaattatttgagactgcatgacctcgacttcagataataccatgattgtctttggggttcattgggtagactcttgcctctctgagtgggtggtggaggttcctctgggcattagtggtccttttgtcagtcatcctgttgtcagagtacacctgacttctgggagtgatttctcttcatcttggtaaactggtcccttccacgtaggggcaggccaggaaataggcagagtggtgccctttcatccatgtgtgagtgcccacctggctgttaatagtatggctggagcatgggtaccttgaaggacaagtggagaaaaggtagcggagaaagtgcctgccaaggtaacagaagtcattagagaggaaggtagatgtcttcatcagaggttggggcccagtcgctgggaagttggtggcagtcagtgtggctgtgctctttgccttcatctcccaggcttctcctgctcactgtgtgtctgccctatgcttctatgtgtgcctgccctccccctaatctcttctctcgcttggcagtaaataacacgtgaccccaggtggtcactctggaaggccattctgaaactctaacttctgccagctcacatcacagacccagtctttccacttcccacttcccaattccaaattctctagaaggacaatctgattggcttagcttgggttccacgctcaccgtatcggttttactgttgcagcgcttacaggagcagattcatttagtgtgagcctggtggactggctagaagggagtgcagacgaggacactcaggagagacgtcctggaagttagaaagtttcaagaatggacaggagcagtagtttcaaacggcctagagatgtaataaagggatcaggagtgaatcttagatttagcaaattgaagtctttcagcccaggttgaaagttgtgtctactgggcatggtggctcatgcctgtaatcccagcactttgaggggccaaggcaggcagatggcttgaggctgggagtttgagaccagcctgggcaacatggcaaaaccccgtctctaccaaaaatacaaaaattagccaggcatggtggcacacacctgtggttccagctacttaagaggctgaggtgggagcatcactggaaggcagggctgtagtgagccatgatcacgccactgtactccagcctgggtgacagagcgagaccctgtctcaaaaaaataaaaaaagaaagcaagcaagttgtgctacagctaatccatgtgggagagtcacaaggtggaaccaatggctatgattactcatttgtaagacactgaaagaagagaatttttaaaatacaatttaattttgaagatgtagcagaagcattcaaaatgtaattttaaaaatataattcgtattgctttttaacgctaaaacatttctacacctttattctgattctgaaatacacagtgtctcttgtgtcacttgatacattataagaaattcagtaaagctattctagaactcatttatttttcatacccctgaaagttcataaaataatcataggttatttccatatcttattttgcagtgtgttctatgatattgtgacagagcttgtgaggaagcctttatagccagagcagacccctgtcccaaagatgatgaactctgccacttaggttaacaatacaacagttcatagaaataattggaaccatttttcttctgcagagtaaatcctgtatgtccctctggctttcaaaatatcacttttggatgtgtagttcaaatatgtttaggattgagcctgatgggggtttaagaatatttcattgattcaaagtactcggtgttggctagaaaacatgtcaagtttctcagttaaccgatgttcaataaattacttttaatactataactttacattgtgataggactaggaccttgtggtaagcctccagactcacagttagaatcagagaacctgcacaaagcgggttgcatgcattttcatgatgcttggcaactagaggtagtaacccattgtgacattgatttcaagtcctaactccttagtgtgaagagccgaggtttctgagcaggtgtttgagtgccctctggaggccttgtgaacagttgaaatgtggactcctagcaaagctttctttcacagccagagttgagaaccagtgggcgagatggttgaaactggtgtggatgttaggagcagaggagaggggagatggaactcatgggaatgaactagtgtttacaagagcttgcccggccaactgataatactgggtttatgcagtgagtgtagaacacagaggccgtagggtcacagaaggagccaagggagtgtggccagtaatgtccagtgggataaagaacaaaaagtgcccttggattggccaagagaaggccgacaatgagagaggaacctcggtggtgtggtgttggattgaggcatgagtgggaagtgaagcaatagaaatctggaaaaatcagtctttaagaggtctggatggggaaatggagggtggggccagggagacagggtagctagagaaggcctgggattaaatgctgtttttccttaaggttgggggagacttctgcattgtgtttaaatgctgaagggaagaaacaagcacagaaagaaaacagttgaaaggggtgtgggggccggggaggaggagagagttggtttcaaagttctttgcctgggagatctgttgagggaagaagttgccttttatagggactttgagtttgtcaaagtagtgattttcagtttatcgtgggatgatggggaaataattctagtaggcagttggagatacaggtaagaagaaaagactgtgttaagaaactgtggcatcatcatcatggaaatggtcatcattccagccaagcaggtagttgagctaaaaaatggagacaggacatactgtatggaggactcctatatttaggcataggcatgtgagatggcagacacaatcagcaaggccagaggaaaagtgagaatgtgcagggaactgggagccgaggagaccgtagactaggattcagggtgaggcaggaggaacggccccaagatttgactctgagagcagttttgtagtgggggtgggggtacagaatggtgtgtgggaggtgcacacagaaggtattatagatgctgtggaggagctcagtagtgaaagtgagaagagtgaattggtcttagtcgggggatggctccagagaacacatgtcacttatctgtgcatatgaaattagagctgtaatcaacaatgactctagaaaggattatttttgcttttttgtttttaacaccatcatctcagaatataagatctaagtttcatgtaacttttgtgccacttcctactcttctcagattgagaatctgaccagaaggaagaaaatgtctaggtctattcatgacatttgagggagttcttgcaggagagagtaaatgtgactgatttttgatttactattctgacacacgtcaaatgttaaatcctttaaatctatgagaccatttgctatcataaatgacattttaaaaaacttcttggtaaaactaatagtatggctaatagaagttatttggcttcacttatttaaaatatttcgttaagaaaagataacagattcctaatatcagaagtggtaaaataactgtgtttaaatctgggaggtgggatttgacctctcactttagactgagtgcccagtttgagcggccaggcgtacagtttaagcatacacttatccaaggggtggaatggcaggttccagcttaggcccaaacacgtccgctgctgtgggactggtgcgaagatctgtgaaggccttaagccattaaacttttggaggcctttactatgtcatatcaaacattaaatcacccatgtcccacataaaattagcttgtacaaaaccatatgagttaagctttgattggctatagacatttaacatttattaactttaattttgcaattttcttttcatgttttgcatccagtaatgttttttttcagatctgaaacatttacataggtcttcgagatgctcatgagccttagggactgtgcctatatacctagagataagacatcccagttctgctgggaagtggacattgggtatgtctaggcatgtctggcggggggctggagggggtgggcttgcccagaatctgtttgtttgtggcactgaggcacctcctgggaaaacttcatcttaagggggagttgaaggaagtgttttagttagggattttttgttgcaaagaacagagtttcattcagaccactttctgtacaaggggctatattggaggatgcatgtggatcagacccatgaggaactcaggctgtccagagacaagccacagtcttcccatggacagtgaggtctctcacggcatcactcatttctttgtgtctttctcctcttgctgccatctggcttgtttttccctcctctgtatgtcttttctaaccttttagctcctccttgcttatagattctacttcctcatgagtttggtttgctgtgatttgatgacctccgcagtcattttgcggatcataacctctcagcttcatctctcacagctgataacctcattctctcagtattgcttagattcctgagagagagggaatctgattttgttttgcttttattgttgttccaagccacatcatatgtcagagttaagctcttgggtcagatgtctgcacttggtctcagaagtggtcatgtggccgatggctgcctgggcctacccttaaagctgaagcagttcccattagtaggatttgtaggctagcaggcaccatgattggcatgtatagttcagtaagggaggaaaaaacctggcccaatatcaagaccacttgaaattcctccaaatgtattcctgccctttaaaatattatcctgctaacagctttcattctaagttgaacctttattcccacagagaaactaaaatagctaaatgtgttgaaagcattttcacttttccattttcttcctgttttattcagtctctgacagtgcagggccactcagcatagtctacaggactctatttctaatgttagtgatttctgctgaaaatgatatagcaacttcagatagctattagcaagatggatcattctaaccacatgcctttcacataatcctttcccccaaagctctggggagctgtagaggcatactgtaatccagcactgtccccagattgacaacagctagaaaaacatgtaaatgtcccatccacatgtagatacggcagcagtgtgaacctaagttccttaatatatcataactcccaggggaaagtgaagttccccaaacttaaagctagatcttgagatctatacctaaacttctctgaacaattatagaatatagcagaggcggggaggtagtagatggaataaataaaataatgataatgatagctttgttgagcccttgaaatttgccaggcagtgttttaagtacttctcatggattaattgatttaatccttaaattaccttatcagatcagctgcctttattatctccattaactcattcttaacctcctaggtgaaggttacacagcaggtatgcagtagggccaggacatgaactcacccagtctgactccagtttgtgcttcttcagtaccctgagagactggaaaatccgtgaaaaaacactattgattgtttattccctggcattttagccagtctgagtcagttatcttatacctatgaaccttaaactcattttggatctggttcccatcacgaggctaattgtgataatgggatacctatatcttggagggaagttgtgcagagtgcctggattttcctttctgtggtttctcagatttgctcatcccttctttggacctccatgccttgaatcccatatatttatataaatcccagatgtaaataggtctgtcctatcttctgagctgggaccccacgtttatagtagctagttcatgaaaacattttgtgatcctaaattctctataaataaacccatttttctctttgcatttctcccatccagcaggatcctaaggcctttgtagtccttcagccactgtgggccctgcctctgcctgttcttctggaatgtcttgggggttttgatcctgtcactgtggtaagttttccccttgtttcaccatttgtcctagatggagaatcccccttgagtattttaagccaaagctgtctctagaattttttctgagcatgtgccctttgggctcagtgaggaagcagctctccgtgcacgctcttcctgacctctcgcctttatctggcattggattccccagatcttggaccaccttccttactctaaagatgtcagaaacatttttgtccaactctttttgttccctgggatcttcattttcttctttccatgtgaaccattggttattaaaactttgtttcagttgtcccattttcttctgccatcttggaggccttacatggattctagatctcatgccaccctttgtctttttcttctgttgttcctatcctcaccgagctatcaaaactttttaaaagctcggttgctttgtaaatttctggtgttttttttttccccaacgtctgaataatagctttttccttaaatatgagttcctgaaaatcttcttacctgaggattatggtttcacattgatctgtgcagacttgattctgagtgtcattgtgttcccagcacaactatttttttactttgttttctctttggatttgttcttttttaaagatttttttttcccttctttggctcaactcaagaaggcaacatatataggacaggtatttgtttatctttatttggtcattgctgaaatccagaatactccagttgagcatacagtctagatctctgtgattcacagacatcatgaaattgtatgttatttccatgcatagctgggcaggaagagaaaggaaagcccttgtcttgatagctgctggcttctgggggcatgagcttcttgtcatttcccctgctgccagaggctggtttctcaggccctgggcttctgccttcccagacttcactttcccatgcaacaaggaggattggctgtgggaggtaaaggatattgtgttggcctctgtcctagtgggtctagtgactgtgcgttgttagaaggctaagcctatgtagatgtgtgatgtcttttctttttcctggctgtatgtggctagagtggtaaggctggggctgcccctgaacggaaaggtcttgaccacctctcttccttttctctcttttcccatgtgctggattggtttccaggtgactgacctatttagaagtgggggcaagtggaccctggcacaagggcaaatgttctctcttctctctctctttctggctgcattatctcctgtgctgatttgggtaacctcggccagtctttatcgtgagtggtaagaccaaagagtcatgtctaatattttatgaattccttttcattcccgtatgcgctttggtcccagtttaagattgccactaatgtagggaaaaggagttctccatgtgatccagcctaccttatggaatgctgcattggaaattggattcacaggcccagctaataatgaagtgttctgtattttcagttcagtcctgtgtacatgtccatctagggtacctagaagttaggggtgtttgctgagcccactggccagatttgctattagccattaataacatacattttcagaacagtactggatcaacctccagtgccagtcctacaagatcaaaagcctgaaggccagagttctgcataatttgttgtgaccattccctggccctctctgagagtatagtggcaataaatttctgtccatccatgcagatactgaattctattcttaggattctcatcatctctgttgatttttggctgtaagaggtcacctgctcttgcactttgtgcttcctgaatgagcctactcaaaaatctctctcccttgcttgctttggtttgccagacaatacatgttacgaattgtgacccaggtataaaaatagccagactcttgatgtacttaagaatagtcacattcatggagtcaagaaagtagaatggtggttactggggctgggggagaggtaaaaggggagttgttattgaatggggacagagtttgtgttgcaagatgaaaaagctctggagatctgtttcacaacagtgtgtatatatgtaacactactgaactgtgcacttaaaatggttaagatggtagattttatgttatgtgtttttttaccacaatttttaaaaatgcatacaaatgtcagaatcacaaatccataacttttgaccccctaactactgttgctactcctactgccagcatcattgagggcagtcttgctaattacccacttttcattttacctgttctccagggcccaacctgtcttccttcttttagttggctaggctggggcccctgtgaccttcaggtgttccttatacctcttcctgagggtggcttgagctttccggtctgttcttcttttcttctgggcctgagcatgaattttgtctctttaggtcttactaccacagtggaaggaggaaacaagtttagtaaatgagcactagagctaacctgaactaaacctctgtgcttccttttgtgttccctcccccagctagttcctgcctgacctcagatcagaaagaatcccctggccagttgtgaaagactggtcccttgagggagacaaatccagtagtcagccaaagggaaggataaggaagaggcagagtgcaggaaagtgggttttcttatgttctgttgttctttctgtgcgttgactctctctaggtatcctaattgtatcctgaggaaatcgtatttttttctgttacctcatcggtgttccttgttcctgaggaggcatgagtagagggtgagagtgagcatctccatgactcacagtggaacttctgtttcatagccgagtaaactgaggctggtgagaatcagtgactacagtcagacagctatttagtattaggtgaagattttgaacttaggccttttgggctgcaagtccagtgttctacccaccaaattattatgattcttagtgcatgtgtatgttacacatttactagttagataagataaacttaggccttgtatgtggggttcacgtaggggctatcactgaagctaatcattgtgtcccattactcaggtgtttctgtatatggggttgaacagcaggaaaaaaaagtagtggggtgcaaaccaggggaaaatctcactaaagtaatattttttaaaaagcaatcctgtgactagatagtcaagaagggaaaagttatgggtgggaacagggagcagcagacacataggtataaaggcagggtttcaccttgaatggaggaagaaccctaattacagggagattacatcatcaggtgtttggaagcctctgcctgtgaaatgacattcttggcaaatgaatgaatgtgtcatgcactaattaaaataaaggaaataaggaaactaacattcatttagcctcagctatgctgtgggcactctgataggtactttcatgtttattatctttaattaccgcagcaaagtattgtagacattattatccatacatttgcagctcgatcagatcagccacagtcacatagcaggtggcagagcagaggcctatacccagtgatgtcattccagaggtcattttgtgagaggacttggctgaaggaaagctacagaatggatgcctgtgtcatccttgatcaccctgataacacatgcacttatccttctcagactttcttctcagactcagcagaaaacttggcatcattcccttgataacttttgttgcccttctctggacctaatttcatagtctttgtggtaatttcttgttaaagaaaaatcagacacagcttcttttgtcttttatcttttctccattaggagtcattaggctaagtcatgcaaagacgaatttccgcaggacaaaatgaagcatatcttccctatagctcattaaaacccagagcccaaatcgttaagccattgaactttgtctgttgtgagagaaatcagggaacatagaactttggtgtgtagggtataaggaagtatgcggggcagtaaggaaaggggagaaggaggcgaggggcccaaacacctggggaccaagtaggaaagtggtctgagggtggagacgaggtcctaggagtgtctggaaggactgttgtcagtttctctcctagtgctcaggagtcaagctgagtcacaggcttttctagccagctggtggcagggctgtgcacaggagggcatcagaagtgatgtaaaatcctctcttttcagtctggagcagatttttaagtttgccctcattctggaaaggagaggagtataaccgggctgatatcctaaatttagttggagaatcctgctcagagtcagaacttcttttgaccaaactcaaaagctgacttcagaacccttggggaagttgttcctagtatcacagaggctgtagttattaacagcatgttcgggaaatgctggctgctacttgagccacaggtaagggagcgtttggattcctgtcagggcgtgtttccaggatgctgcatgaatgacagccaatggggcagagactgatgttcttttgaggagcccacttttagaggtcattctacttttcagaagtgcatgtactccagtgactacagcagaatgcattggtgcctgaactgacaggcctttgagtcaacagaacctggaatatctccgaggctgggctttgtggtgtggaggatttgaccacagagatttagacctgggaattatggctgtgcttgggctactctgagtgaaactcttctcctctcagttctgaccacctccaacctctagtaactgaactcggcccagaaagacaaagaaacccagattcacttctgtgagtgataagcacatctgagaaaaaaggcctggcagttggaccttccgaggtgctgtcggctggaggagatgaagtgtgagaagttgagtagctacaggccttagtggccacttaagagggtttggcgaagtcagagaaggaccctctttcagagactctgaaagtccattgtcaaggagagaggtctaggaccctacaaggtggagcttcactgtgacctgttatcattgaggtggccaagggcacatgcaggcactgtaatggggaaaagggccctggcttcttcaagagtggggaatgtgaagggcctctttgggacatgaatctgccttgggcagccagaatcttcaatttcagaactattgatgatggtggaagcaaaatagaagggatctgacattccacagtcctaatcagtgagttgccagtgactgccataattaagttattctaaggcaaatagttaagcaaagattaagtggacgagacctctgtaacttgagtatctaagtcttcctataccaagttatatgtattttagactacacttttctaaaggtgtagtagagactagtgaggaggtagatacaacatctgctgtgttcccatatacctgaggctcatggagagtggtggccttgaacagaacaaatgccctcttaacccggttcctttggcggtatgtacgtcctgatacctaaacaacgtttcctttaatttattttttgggtgtgtgccaaggcctgtagaaaaaggctgagcagaggttctcttggagttgttttatctgctgagacttgccaaattagaatttgatggctttgatttctgggacttcctgatcatttttgaggaggaggagttcctaactaagctggagggcacatactttctccacatgagtggggcacccatgatgtcagcgaggacagtgtcagatagatgcacagcccatcacccagaaactaaggtcttgtaagaataccttagtgaattgtgccagatggaataaattctgaatcctttataaagcatctctttgggagagttctttcttgtagtgtttaggtctcaatcctctcatgcacgaaacttcagaattattttggaggactttggggggcgtttttcttatatctagaagaggaatgtttggtgatggaaattactcactacacataagtggtcatcttacagtttgtttgcatactttcagtcttcaaaaaaagtgggtttaagatggattctcaacccctttttgtgtctggccttccttacactttaaaaaccatttttaaggactccagagaactttaagtttatgtgggttgcaggctttggtacttattgtaatagaaatgaagactaaagttttatgaagatacttactaactcatttatttaaaaatgataaactcattacatgctaacataaatgacatttttatgaaaaatagctattttctgaaacaaaacatttagtaggaagagtggcaatatttacattttggcaactctttaaatgtatggagtttaaataaaagacatctgcttctatattcagtctcttgcaatatgttgttttggttgaagtagatgaagaaatccggccttgcatagataatgtagttggaaaagggattttagtagccttttcagataattgtggctttatctgtgacatgacaccaaaacttgacaagtggtagatgcctacgggttagttgcaacgtacaatctgaaactgtattcatgaacttttcgtactctggtatgttaaaatcccttggtctctcttacactctgaatagatcttttacaaactgtgtgaccacatgttggtcatttggagccttcatggagtgcctacctagatgaacattaattagcgggaattgtactataaattgtgagaacatgttgagaaggaggatctagatcagtgggtgcttagctagtttattcaggaagggtttcagctggggcataactagggggcaaagaacatctgttacagtaaaggcaatgatgaaaatgtactatttgcatactcagtaatctgaggaggttgggattacaagcccattttacagacaggaagctggtgctcagacagttgagagcatgatctgagggtggtagggagaggtgttgagcatagagccgtggcccattgtgtgtttcatcacggtgttgtgcagctaagccccatcctctgctgagtagagctatgagtcaagtaggctttaaaaaaaatagtttacagacaaagaacattttcatattaagtgtgaggccgatcaggcacttgccaagaaccacatttagcctctgagtcaatgcttcacagactattgtgtgacctggggatcctgctaaaatgcaattctgatttggtaggtctaaggtggggctgaggttttgcatgtctgacaagctcccaggtgaggctgataacgctgctccatggctcagttttgggaatcaaatttccagagccagtttaccatttgttccttaatacatgatatgaatgttaatcccagtcactcaggctttggagaaggagaatggaggtgggcggagatgggtggtaactatgtaaaattctttgtcagttagggctgcctggtaatcagcaacagaaatggactctagctaatttaaggtaaaaatgaattttagaatggaaggggacgtggaggaacccagtagcgctggaggttcatagttgtaggaactgcttagatgtctgtcctgggtgctgtcactagcacatgtgaatgaactctaatttttaatgtcatctttgactcttcacaattcagagtacgtggagagaagactggctggctcaacagaggtctgttttgtaccccctgactggaccaggcactgtagtgagagggaagatctggggatcttgtccttcacaagggaggatagaagagcaccctgatttatcagcccattattgccgcatagagagggagaggtaatccctgaacaggaagttagagtgcagttaggaaagggaaaggaaagctcagcaggaaggctgacctgttgccaggctcctaagccatctttcagttaacagtgtgcattccctgtacttaccaggcaggtacattgaagaaagaaagtatgtattgagcttaagtactataataaatatgcattgttttatgcaattttcaaagcaaccttaagagatgcaagtataggtattattgaggaaatgagtcttggggttgaacaacttgcttgaggtcacacttagtaagtgggagagctgcaacttgaattacaaagtttctgctgcagtatcatttgttggcagaaactgctgctgcttggggtaaaaggttgcttcaagtgggctgagtgtgagcataagtggtggaagttggggagaatgtgtatggacacacagagctggagatgcataacaattcaagattttggagatagaatgctctgtaaaacaagctcaaatttagctgtgtctgttaagagcttcatggcctcaggaagggctttcagtctcttagctctaccagattatggctttgcctgtgatgggaaaggatacttccacggaatggaaatttaaggtgcgaaacccaaggagagcaggcaggaatggggaaaagtgttcatctggaaatcagacagagtggacagaatgtcgttgggggcgggctttataattgatgggtagcttttgcagtggccaattagattgcagggctctgtcctcattgcctggccagggagggaatgaagctcattcctgcattaccaggacaaagcccacttgtgtgtgatggacggaagtaggctgggtgccccatgttatatgtattatatacaaaacccccattcactctggctagtctaattgtgaagccactgctcaccccttccccaggctgccagccacagaagtatgtatgtgtcgttgactttttggtgtcagaggtgaagactgtagatactgtttgtggtttttttgtttccttgggagacagaagcaaagaataaaactcttgtaaaggaaaggaaaaataaagattttctatgaaatgtaatctcttaagtaaaaatatttaagtgaaatctgcaacttctttttttggacgtgattaaaggtgaaatgactccgggtttttagagctaaaagggcttgggtgaagtgtgaaataagcaccatccattcagcatcaccaaagaataaacaatgccccttgtgtacatagagcccagatggaggtaaggactgtgatggcaaaatttcactgagagcatgccacatcctccttgtagtttccttgggctgctgtaacaaagtaccacaagctgggaggcttaaaacaatagaaatttattgtctcacagttctggaggctggaattctggattaaggtggcagcagggccgtgctccctttgaaggctttacaggagaatcctttgcctcttcctagcttgtggtggttgctagtagtctttggcgttccttggcttgtagacatatcacttcactctctgcagtcatccccacgtggcctttttccctgtctgtgtgtgtgtctgactctccatgtcctctcttttataaggatagcaggcattggatttagggctcacactaacacattatgatgtcatcttaattacatctgcaaagaccctgtttccaaataaggtcacatcctgaggttctggatggatatgaattctggggagacactattcaacccagtatactttttgcctttcttccttagagctccagctaatccagatgcaacattgacgaattagtgccggaatgagtatcagcacttggtactgcaattagaacacggggatttggctgttgatttattttttgggctacactgggagggaggctcagagacggtgtgggtgtctgaaggaaaaaatacgtgttaagtgaagtgaggacttcaaacgaaatcatacagttttgggaaactgcattggatagggaatgctggagccaaagagtgttccctgttccagaaagggaggtaacatttgcaggagggcttctgaggtcagaagttcctcctagaagtgcagggtgtatcagccatctcaggagctgatttcctgtgcaactttttctaatacccccgggagcctttcttatactttatccctttgtatgtttatggatcaggtccttcccactcttcggcacctgtgacaggctccacaggcttccaacactttaaatgccttctgtttttcctaaaagatagagtcctgagcttacaggacttcataggaagacctgtaagtctctgttggtctttataggtggactactatctcctgggtgtcttgtaactgtaatgtttatattttttcagaaaaccctacagagatgccttggtcactccagataagagtttctgtggctgagaggccccactgtatgactcctgtttctgcctgctggacttcactttctggggcttggcatctgatgacctctgtatacatgctgtgcctcctgttctttatgtggccacttcactttgtcctttgggtttcagcttaaaagtagagtcaactagaaatcttcattaccatgctgagactagttaggatgcccctggctcatcagctgtaatgcctctgtcaaagctccactcaaacatgctagaaccatcgccttcccctcctcaactgtaaaccacagaaatgcagaggccctgtctgttttgttcatcagatcctccggagcatagcttactgcccaacagatgctgggtggtaaataaatgtggaatatgtgcctgtgtgtgtgcagctctgaccctgtgcctcagaggtcagcttccaggactgttgcctcaataacacctctcttccaagtctgtgtcagggtgggctggcttctctcattgtcacttatctatgtcaaataatcaacatgtgttagaggactagggatatagggatctttctataaaacccttcccattaattaagggaccaagaagttaatgtggatcctttatatgttatgattactggcttagtgcatcgtctcctgagccagggccctttgattatctttcttagagaatcttatccagcccctatgacacaattgcctgctgtatgcatgtggggagatgaatcacatggtcatctcaactcattgcagttggtagtggttatttttggtagggattggaggccgacatgtcatcttcccagttctttttcacttttatctttcccagaaagtgtgcccttatgctttgagtggcaaaattatataccacacattctgatagatctggttctgggtaggaaattaatttgatctctgttgaaattgattttactgtcagagtctgctattgaagagggggattatatatagttagtgcttcataggaagacctgtactcataatactgctgaaagatctgtgatacttacaggtttcttaaaatcagaacagttgtctcaaaaataagaaaataggtaattttcacttgacttttatgacaaagtaattgtatagttatttaaaaacgactttagatttttctgagccagcagtccgaatttcagataatgtattcaagataaaaaaagaaaagctcagtccagacatccagagaggagcggtgttgggctgaatcttaagtaggacatggacacttcttccatttataaaaggaagaaagggctagagtcgggcagtacatgtaccttgatagtttggctggaattggagggagttctctgatgggttctcccttttctgtgtggcatttggtttgaagagcagagctagctgcaggtcagacatagattgaacatggggaagggggcaatagccacatagcaagttggggtgaggtcacacaagcattcctgaggcttggaagacccagctgagggtatcactgtgaagaccttggtggtctatgattctgttagcatgtgaaggtagagatttggattgggataggggatgatttcctttagaaggaaggcccgtttgtcctttgacgattctcatttggcaaaaactcagttttgcagaaacttagctatctgccttccccatgcagcccctgaggaactgagccctgggccaaatccatgcccaccctcgatgctgctggcagtctccctacgtttcttgggtcatgccactctcccaccctccagacaaccatctcacaccacctctgttctcctcaaacctccaggctccccattgccctctccttctcagcagatggccttgcttcctgcttcccagcagccagggactgtcagtttctacttaaacacacacaccacttcctaccttcgcctgttcatagaggcccgtccttctcctctccagagctcattcctctcgtggagctttggatcctgtctccattggccctttctgttatttcttttctctcccatagtttagtggaattcctctcatttttatttcttccctgaacttttccttgaagtctaacatgcagattataaatagggctgtagtgtaatgaattttcacagctatgagttgagcacacctgtgtgccccagtgcccagataaagacagcacatgacaacgatccctagaaattccctcgtgcatctttctagtcattagcccctctgtctgctctgttgtgtaacagcatcagttgatttgcttgtttttcaactttatgtaagtggaatcattcagtatgtgctcttctacttggcttctttcaaactcagtcattaaatgttggtctcctgtagcttagtcccagggccctcttcccttttcaccctttgttggtaggcagtcttattccctccccctgtttaagttaccatctaaatgttaacggctcacacatgtataccttataaagtcctgatctcttatctcagtgccagttccatccatctagctgctgtccttgacatcgacttttggatatcatgagcatgtctaaaatggaaatcacaatctttgtcttcaaaccttggtctttctaaagttttctgtcttactgaatggctccatctccatccagttattcaaataaaagacctgggggtcatccttggcatttccttgtccctcacccattgtattgaatctgtcaccaagtctgatacatttttctctcatctccaccattgctttagtccagattatgatcattgtttccaacccaaatgactaagatgatcccctaccatgtttacccctaaatgctcttgctttctacccatcctttaatttctgtactttagctacagttttctatttaaaatggaaatctgatgttactaccaaattttaaaacaaaagctaaccgctctggaggcttccactgctactaagataaagatcacgatgcctagcttctaccctctcatctggcactgagcgtctccagccccgctggccctgttctgtcccgtgcttgcctcctgcccctcaccatggtcctccacgcatgcctttccctcgggtcatgtatcttctcttcaccctgcagaggcctcctctagatctgaggtcagccatcagttcaaagtggtctcccctgacctctgacccctgaccaggtcagcctcacttccagcccagcctgaggtgctcagagcactgtgcagggctgctttggagcatttcacatagatttatttgacatttctttgtggacaccttgatgaacattgtctccccactagactgcagcttgcactcggaaagggactggctatgattctgcactgctgaaggcacagaagctgacataggttagacactcagtaaacatttggtgcttgaatgactttggaagacaaagagatgaaggagttttagagattcacaaatttcataaattctctgcagtttctgctgatcaaggagcttgcattcaagagagcagggagaggagcacaacaaaggaagcatgtgcaaaaatgagcacaataattccaggcagtaagtggtaatgttctgtacaaaagttaaattaagcagaaagaggtggtcagaaaggtgtgagggcagagaggtaagtcagctgaaactgacaagcccgggagccgctttctaggaagacaacgcatgtgctgaggcctgggtgttgagcagatgccagctccctgaggaccaggaagaaactgggcagggggctcatgtgaaggtactgagggcacatgaggctggcaagcttgaagactagaaaggagatgagggaggctggtgtgtggtttgcagagagtgcaggaggtgaggttggaaggaggcggtggctgggccacctccagcttgtgagccagtgagaggatgtgtgttctaaagagcaatggaaggattaagcagggcagtgacgttctctaacttacatttttaaaagataagggtgactactggtagaggtccagttgtggaggagcaagaatgaaagccagagagacctgtggttgagaggctgttgaaatagtgcaggcaggaggtgaccgtggcctggatagggtggagcttgtagtggccatggagagatgcaagggcagggctgggttatgttgtggagaggaggtagagtgtgcagtgatttgcactggtggggctggaggaaagcagaattaaggacaatgcatctggatggatgttggtgtgcttgacagagatggggaagaatgaggaaggaacagtttgaggggagatttggtttggaaatgtggttgtagtgcctttcagcagagattatggagcagtccagggctagagataaaaatgggagccaacatctaaagagtattttagatcacgtgactggtgagattacttagagggtatagattcagaaaagaaatggtcccaagcaggagccctgaagcaccccaggatttagaagttgaacagaagagaggtcagcagtaaaaggaacaaggagtggctagtgaggggcagggacgggccagctaagaaagcaggtgtttccagccctgtcttggggccctgtcctgacagaggcaggacatgttgggaaagaaacatgttttcagtggcatgttgggaaagaaacccgcctgcaggggtggggctgtggtatccaaaacaattttaagaaggaagatactagaacatgtttgtatgagaatggacctatagctaggatggaattgacagtggcaatgagagggagtacttacaggattccatttggagaaggcccaggaagtgcactcatgggcacaagtggaagggctggtctttcctaggaacagggcaccccctgttggagtagaaggtgtgaatgcaggtggcctagtggatttgcagtaggaaaatgaagggcttgccatctaattgcatctttttttttttttttttgagacagagtcttgctctgtcgcccaggctggagtgcagtggcacgatctcagctcattgcaacctctgtctcccaggttcaagcgattctcctgcctcagcctctggagtagctgggattacaggtgcgtgccaccatgcccagctaatttttgtatttttagtagagacggggtttcaccatgttggtcaggctggtctcgaacacctgatgtcatgatccacctgccttggcctcccaaagtgacgggattacaagcgtgagccaatgcgcccagcctgcttctattttcttaatcagaaacaggctcttggcaggttatcagccacgagtgagggagtcagagggaagatgggagatttgaagagaaaggagaatgatgaagtagcaatttaaagtattgggaaaatgtgtgtactgaagacttttggaggaatttaggggcactccagtgcccatttgagatgtgtggtcgtgagttaaataaacctggcattattcagccacttgggtgcgtgtatggatagatggagagttgggtttgaataaggtgcggtgtcactgagagtaggtggggccagagagttctggtgagcgcagagagaagctgtggacaacagacagggaacaaagggtcaggccactgggtgcaagcctactgcatgaagttcctggagccagttaactggaaggggagggagcacccggtgtccaagaatgggttgcttaacacagatttgggagggagcacagtttctgggggtgatagagctagagtgtggccatggaaacagtgatgatgacagaagagagaggtgaacctgggtggagggagggcataaggaacccaagccagcatggaagccaggaagtaaagacaaacagggccacattagtaggacaaagattgaaagaggactggaggtcctgagggagcaaagaaaaggttccataggattaacagagcagaaagctggaacaggatgttttggttaaaggctagagtttcactcaagatggacagattgcttacagacttctggacttgcataggttggtgttgtcagtggaggcggaggcaatgtttatttagctttgtaatttagaacactgttgtattctttcttacggctttagattgtcatacagggattttctaagccaggggtccccaacctgtgggccacagatgggtaccagtccatggcctgttaggaaccaaggccacacagcatgaggtgagtggtgggaagaaagccagtgaagcttcatctatttatagctgctccccattgcttgcattacctcctgagctccacctcctttcagatcagcggcggcattagattctcgtaggggcgtgaaccctgttgtaaactgtacacgcaagggatctaggttgcacgctccttatgcgaatctaatgcctgatgatctgttactgtctcccaacacctccagatgggaccacctagttgcaggaaaacaagctcagggctcccactgattctacattatggtaagttgtataattatttcattatatattacaatgtaataataatagaaataaagtgcacaatttaagtgtaatgcacttgaatcatcccaaaaaccatcacccctgcccccagtctgtggaaaaattgtcttccacaaaactggtccctgctgccaaaaaggttggggaccactgttctaagcaaaggcttcctggcttccattttattatggaaaatttcaaatgaactcaaaagtagagaaaaaaacaaaatgtactcctatgggcctgtcaccacacgagttgaacccaggttaagaaaccgtgagctttttgctgttcttattttgtctaccctctctacttttttgttcacacaagaagccagtttattacttgagttgggttttgttgaatgaccacaggtcacatactcggtgctggcagtcttaccataacatgcagtcagcatttttgaaaacaatgtaaatatataatacagttgtctatcttttagtttccaaagtttgttacttcacattttgactggatgataatttatagaatgtgtgtgtgtgtgtgtgtgtgtgtgtgtgtgtgtgtgtgtgagagataggccagcatgtctgtattatcctcattatataaaaagaaaacagatgcaaagtagtgttaggtgacatgttggcctgaagttccaagattaagtgggaatacattttaaagttccctctttgctgttcccttctcttgggaatgttcttcattcatacagcatctgccctccatctcacatcccccgtctttctaaaggcatcactggcccatccctacaacaagctgtctccatgccagccccaagtgctagtaagacattgtcctatacctccctggtactgggctctgcaccagtgtgcccttctgcgtactcttttcttcaccagcctggcagtgggatgttagttgctgggcggcgctattctcttcctcagttggtggtgacagctgggtccctgtgcctctgcagttcttgcacggaggtcatagccttgcgcagagcaacacagacgaggcacttggcctcctgcttagtagtcggcatctgctggctgaacactgtggacataatctgatgtcaaggctgaatggctgctaattcctttaggagtgtaactggatttttctctcctgcccagtcaaggtgattagtctttatttcatatccagcctgtgttgaatataatccagttcatagtccactttgtggaacatcgattgtagcttaccaacctctacctccatgtaaatagttggcattcctctgatgctctggtcatcccattagggctgctgcaaccaactcctgcagcctcggccctatgctggagtggtagtctccccttcatgcagcgggttcgcctcttctgccgctagagtgaggaacttttggtctgaacagccttcaagggaaaccagcttcattctcccagcctgttagtcctgtacccccgtcttcaggttcccctttcttatgccgtgacccagagcacgtgttctctcaggatatggttcttgtatttaagactcagtttttgacttccttgaatcttagcatcagttctttattagctagttgccctcaattttaattgtactgaaatattagtactgattcagtattctgtggtatcacaaactacagggagagaggaaaggctccttttcatgaaaggtgaggatttgaggtagatgggctaaattttaagctttcgttttcttggttttcaactgcactgtcattttgttgtttgagttctcctccagtgtgagtcgagtgcacaggatgctgggggcgttcctgagcttgcaggtgcaggctctgagtttgtccttggcagccttcctcctcaggtcagaaagagggacttgcagtcatgtgggatgtccccttgaaagccccagtaggacgttgattttgagacataagggggagtctggagtgagagatagccttgggaacgtggtgtgttcaggatctgtgagctctgtggggttccataacctgtatctgcctctggatttacagctgcctctatctgtgtggaagagttgggtgggggctgtgttaggcgagtctgtactggagatccttgctgtgtgttggcctttctgttctttggttggtcacgtggaaaatttgccggagtttcttttatctttctttttcctacagaatgcaccttaacccctctcatccccccaccgtgcagtgagacttacagacaggtctgagaattttatctggaaggaatggcagtgcctgatgcctgaagaagaactctagtgggaggtcatgttggactcccctgtcagggaccttggtattgaactgttgcccttctgagcagagttggactctcctgaggctaggctggcggagtaccctaaccctggcagcttgattcctggagggggctctggaagacacccctgctggggttagcttgccaggcaaaagagcagagcgcagtgctgctgcctttgtcttttgcttgtcgctgccctgcagccactgccttcgcctgcagccactgcctttgcctgctgtccagaggcctcttcctgtgttcattctcctgtgctcaggattgactggggaaatgagagccgtttcggggattatattcgtttcagtcacagttgcccctctatgcggtggtcctgggattagtttgccattgccagaagagcaggaaaggaatatcttagcattcacagatttttttttttaaccatgaaaatttcaaccatacacaatattttacaatagaatcttttagagtagactattatctcttacctaaatgcaatggttacaatgattttaccacatttgctttgtctgctcttttttactttccctttttttgtttgtttgctgaagcattttaagtcacacatgtcagacgacatgtcccgtcattcctgttcttcactgtgcatctctaaggctgtagacattggtttacatagctacaatgacatgatcacatagttaacagcacacagtgtaatctcataccccgaatcacatttccttgactgtcctcttttagcagctggtttgcttcagattgcaaagaagttcctctgattacatctgattgttatgtctcaaatcgctttcatttagagcaactcctcccaccttaccggctttttttccctcgtgtccttattgcaaaaaaaaaggggcagttgtgctgtagagtggctcaccttttgatattttgctacttgcttcctagtagttcctctgtcccttcagttctttccattaaaaattagctccagaggcttgattaggttttgcttcagtcttttgacaagaatgtcttcagagggtgctgggtgtttcccattgcaccacagcaggaggcacacgtgtctggttgttcctctttgagtcatgctaagatcgatccctggcttcaggtggtgacagcctggtcctggcagtgtcaagtcctggatcagccttccagccgcttttttcacccattgcttttcatggtttgaatcaggtgtttgatgaggagaatgcacatattagctggttgtttctttgtcttgaaagagagttcatagaggaaataggatagatgcttctctccatttaattaccaatttttagggtaaaaagttgggcccctagttaattccaattttgttcagtgccttgggtctctccatctctctgcctgcctgtctgtctctttcttccccattctctacagtcattatgagctcctggggtttgtatattgaatgcgtctcactcaattgcctttcttattccttttgatgctcagttgcatgattggctctgtgttcctttggcacggccctcttgctttctggcataacaggatgtcccaggctcattttgtaagtgctactctggctttgaacccagccattcctccaaggaccccttgcctcttggtggggagaggatttaagggaaggggctgtaggtgtgctcattgctatcgcttcttattgcttccaggtctttttggtgataactaaaaagaaaaaaaagtgaattcagactgatatgtctaagtcaaattttatattacagaattttttcttaactttgattttatacttaaatctaatttttcctacattgaatcttggctcctaacaactttaacataaactacttatttgtattaacctactttaaaatacaccacagtaacagttaaattgttgaaagaagtgtgatttctttgcagcttatttgtcaaaagaatatgttctaggtatgtgcaatcagtatactatgctcaaaagccatttgtggctatgtcaccaatatgataggtttattctctttattttgttttaacattcatttaattttattttttaactatagaaacatatgtttccagagtcatgtaacagtatattcagagaagtcttaactgtattctcccccataagtaatcattaaattaaattctggattatctttcaccatgcttatttattttatttatttattttatattttatattttattttagatagggtctcactctgttgctgaggctggagtacagtggtgcaatcttggctcaatgtagccttgaactcccaggctcaagccatcttcctgcctcagcttcctgagtagctgcgactacgggtgtgtgccaccatgcctggctaactttttaatttaatttaatttaattttttttgtagagacagggtctccctatgttgcccaggctggtctcagactcctagcctcaagtgatcctcccacctcggcctcctggcatgctgggattacaggcatgagccagtgtgccaggccagagtttattttatatattaccttccttttttgcagaaacggtagcatagaacatatactattgtgtacctttttttttttttttaacttaacagtgtgacctgggttcactccatgtcagtgcacagtgcttgtcctcattcctttttgtcttgtgaggaggtgccatactcgactcggctagttccctatcgatggccttcggttgcttgcagttttgctgccaaatactgcctcagtgaataaccgggtatatcagtcatttcctatttttaccaatgtgtctttaggatatattctagaattattactaggacaaaggatagatgcaaacataatttttgtagatatatgaccatttttgccgaaattttggggacctaattgaattttgtaattgtaacactttcacctataagcagtccagtttattttacattttaacattacatctcctcaaacacccatgcatgttctctttgtatggaacatattaaaagtgttactttaagaagacctattgatttcatttagttaattttaaagtatcatagcgtatagagtaaaagaaatgaaaagattgctaaaacatagtcctaaaccttaaaagatttcagagtgaatattttgagatttattttcttcttttatctcctccttattctatttgtggtgtattttgtcccctgtaggctatcaaagactggaaataaggcactaagaaatgtacctttatctgctccaccagaatgaagcaggatatgtgtgtgggtgccagagggtgtcctgaagtactctatagattttcagaaaatattcattgaacacctctcattgccaggttataacagagagcaacgcacacagttcctccttcatggcacttacatcctagtacaggagacaggttaaaaaccagggaaccaatacgataattacaagtcctgtgggctttaaaggaatcaaaggagatgaaaacagagtctagccggggggcctctttaggtaggggaggggcagctgacccacaaagctctgcacaaagtaggggagggagtggcttaagtgctgggaacagcatgtacaaaggccctgaggcaggaaacgcttagggtgtttgagagctgaaaaagaaagccagaggcaggaagcacagggagtgaggtggggagaggggcaggtcaggtgtttgagttaaggattgggattttattttaagtacatcaggaaatcattgaggacaagtaggagaatgacatttgataccaacacatcatgtacttattctttctatagattagaaggcaagtcaaatacgatgttttatctccaaaggcagcaatgttgtaccttctgaagttcaaagtggagatcgttttcattgttgttcctttttacaggacagctggttttcatactcacatgtaggtctttttgaggatttcttttctctttcaataatgttccccttgatgttgctcagataattacaatgagttattgtaattggattatatacttgagctgtaaacaggagcatgatatctacaaattctctccttcagacctgcaaatccaagagacacatctttggaagataagagagcttcttcaagaccaaaaaaggtttgtgttactgctgtcacatttatataaaattaattttggaatcaatagcagttttccagataaaagcattttcaatttatttatttatgtttctattacaggagacggcatgatacccatgtagggaattccccaaagcagggcttgccatacctggaccccgaggagcctgcttgctggaaaggctttcctgtctgatgtgcaggaggcagaatgccaaactgactcttcaaggggcaactgcaggggctcgagaccagccagcagtatctcatccttcgatacaggggatatactgtacagtcctttttctagaagtgagacatacaagattactctacaagaggaagattccaggggctcaaaaacgcaaaggtttgcactttgagagccccttggaatgttgacaactcaggatctaaaacaaagttctgtgttaatgagttacagaattcacgtggaagtcaatgtcactttataatcgataataatactgagtgaggaacactatgcaggaagaaaccttccgtagaaagacaggcagggaaaagcttaggctgaccttaaacttacctaatagagcaagcctgagatagactgccaaaatggccaaataagagactctatgaaataacagtcttgtaactgtagtaatcataaggaaattttctccttgaaatcacgataccaaataggaaaaatgatctacaagtgccccatgtgtagggaatttttctctgagagagcagatctttttatgcatcagaaaattcacacagctgagaagccccataaatgtgacaagtgtgataagggtttctttcatatatcagaacttcatattcattggagagaccatacaggagagaaggtctataaatgtgatgattgtggtaaggattttagcactacaacaaaacttaatagacataagaaaatccacacagtggagaagccctataaatgttacgagtgtggcaaagccttcaattggagctcccatcttcaaattcatatgagagttcatacaggtgagaaaccgtatgtctgtagtgagtgtggaaggggctttagtaatagttcaaacctttgcatgcatcagagagtccacaccggagagaagccctttaaatgtgaagagtgtgggaaggccttcaggcacacctccagcctctgcatgcatcaaagagtccacacaggagagaaaccctataaatgttatgagtgtgggaaggcgttcagtcagagttcgagcctctgcatccaccagagagtccacactggagagaaaccctatagatgttgtggatgtgggaaggccttcagtcagagttcgagcctgtgcatccaccagagagtccacacaggagagaaacctttcaaatgtgatgagtgcggaaaggccttcagtcagagtacgagcctctgcatccaccagagagtccacacaaaggagagaaaccatctcaaaatatcagttatataaaacgttttgctaagagtttaaaatcttaaaacccataagtgccactaggaaggaaaccctgtatatacctacattgacccaagaaatatttacgcaatccctagcagaacattgtttctgaggaggcatatgtgagattgatttgttggttcatgccaagtgtgttccacaggttgactttgaatgtggacctctgagcatccacgcaggatggctctcaggtcccagtcacagacgtcgcttcctgggattccagcacgatgcctccatagttgaaagactacacaaaaagccacaatcattgcccggcctcctgagtcaccttctatctatactttgcttaaaagctatcccagatactcccccttgaggagctcatgcccttccttcctctttattcgagcatactggcaatgcattggaaaacagacagctcccactaagatcacgttctggtatttctgaggttaacacttgatttagcccctacatatctttccatatatcctattatttctgaatatatgtcctcaaaatccccataaatatccatcccttcctagatggcattaactttcattttagattttaggtgactcataattcccattcacttagcctatcagaaaagtcattggcagacatatatgtccttgaaccttttttatttgtgtggattctgctcatcactgtctctgttagacttattttgtagtggctgcatcacatatttttcacttgaatttttttggaaatagctgaatgtaaatagcagggaggaagaagcaagcaaagtgagagcttttcttcatccagaattgccctctgggctcctttggtaacagatggagctccttcctagctagggagaccttatgagaagtggatggtaggaggagtcactaatgtttcaatctctatttctgtaatcttgggcaataatgcataggagttcttgataccccttcattgattactgtgtatcagttctttgttaggcatgaacgtctttattaatccatcattcttttcttcattcaacaaatatgtattgaacacctcctatatgccaggcactgtgctaggtgctgggaataccactgatgagacagacaaggtccctactcttgtggagtttacttctggtggaggagacagatgataagtaaacaaataaataatgtagtttgagatagtgattaagtgctatgaagaaaataaactagggtgatgattttagtggtggggtggggtgggggtggggtgacattagctagtggtcagggaggcctttccgcggtgggatgttgagctgaggccggaggagaagtagcagtcgctggcagagcacacaggctgctctgggggatgagctggtgcgtttaaggaacaggccagcactggcattcgcaagcagtggggaaggggagagatgccgaggtggtcagtatcctgactttcagaggcctttttttgtttgttttaatttttgctagattgatattaaaaactcatgtggaggaactcaaggaatgtttagaagaccaaaagtccccaatgacaggaacaaaagcaaccaatttttaactttctcttctcattcctgttttcattgatttcccacatgtagtccttttgctcaggaagtctttggggaaattaaggatctttgaagctctgaaataggtgatcaggttagtggtgtctgtcagctgtctaagaggttggaaaatgaactactcaagatagtcacgaaaatactgaaagtttgatttttctttccatatttgaattaattttttctgtttgactggaaggggtttttgtataactaaaacctcagcgcataaaggagatttaaaaggagcacatgatttagtgggtgggccatgaaactagagatgggatttgggggtgaatttgtcaatatctggattttaatccagacatctctgctaacaagcctttggtaagtcacttcagatacttttcctcctttttacaaagagagggctggcttagttatttgccaaagccccttccaggcctgaattccacaagtacgatttactgtagtgtcttatcactctttcatgtcacaatagcgtggagcattagagaaaagcctagacttttagttgatagccagttgaaatatcattgatagaattttagttttaggaaaaattggtttgatttctagctttattactattaggtatgtgagcttgggcaaatcgcttaatctttgagtctagttttctctcaaaatgagaacattaggctaaatgatttccgagtttccagctagtcctagagttctatatttctacatagttgaattattttatcatgctgttgctggggaatatgactaacccttttgaagctactaattttatgtcgagctttaaagtccataattgttatcttcagaaaatattatttgacctacagtatgtccaaatcaatttaataaaatcgctttataacagggttctgtgcttgacatgtagttgtgtgaattcagtggtcgtgtgtgggagtatgggtatgggtgtgtggtggagaattggcttgcacattaagcccagggtgaccatgtaatttattgtccaaactgagcacttgagagtgaagggagggggtgctgttgatactcacatctggacaacaagcctcgaatgggcctttctcgggcacactaaggtgtgaggacaccttggtctgaggtcacagccacacaggtaataaatgactcaagtcaggaataatccatctggagagagcacagtccactgagaggactgcctcagctcggctgtggctctgtgttcacggcgaatacaggcccacagctcttctaagaaaacaccaacctcgattttcacacacagtttaatcttaaaatgttggcagctaattccttttccttgggtgatccattttggtgctttctgtgatcttcctggtgccccttggcagttcctccaagccctgccctggcccctgctgactgcagcccatgcctgggaaggcgtgaagtgctgtcagctgaagcagagggggcccacgttctgtgccgcagtcaacagtctgactggctgtggcgtctaccagctttgagagacaagtctgcattgcaattccaccattgggatgggagcaacccaaactagcccttctgatgggggtggggggtgggggcaagggtaggtcatctgtgatgggattcactcttggtgaatctgctaggatttagagtgtgagccaagataagtccagaatgactgcatggtttctaacttggaagcatgaataaacggcagattgcctcttgcagataggaagaactctttgcatcagagtccaacattgagatagtctactgcgtgagaatgtgggcacagctcgtcaggccatctcagaaattgaagagggattactttgtgttgtgtgagcatggacatgattccttccaagggaccttctagctcttggctctgttcttaaaatttttgaattatttctcagtctttgtaatgtactgatattctcagaaatttgaaaaactaggtgaatggaaagcaaatatcagaagcagatggaaaatatactcagtggtaaaatctaggaaaagatgagaaaggttgatactactacagggcaagagccatatataaatagcaaagctgagttaagatctatggattagagaggaagagaggaaaaatgaagatgatagagcacttcctctaaccatattcattttcttaatttttctaaacctcaagtttctcatctttaaaatggttttgaaaatatctaattcatggaaatgttgggagaagtaaataaacgtaaagtgcctagcatttagtgctataacgaattcctattcccagttgcctattaaggaagaaaggtcatgttatttggattcctttttgttttgctgagctctgtggtgggtttggacatctaaaattggggtaggacctggagagggctgaattgctccacatggtaagagagagaacttgaatctcctggggtagttggaggtaagaaaacaaagggtagacttggagtgggagagaggaccagggaaccagtggagtaggatggtctgaagttctgagctcttgtgtaggaaaacttcgtgaccacaaagtctttccctaaagttaggggtgtttggcatggtggatttcttatggaaactggtggaagggctgagtgctgtatccagggtgaaatggggcaacacgtaagtaccacacataaatataggagccagaagagggtgcccctgagaacaagctccaaggaatatgcagaatatgcagaaatcttcagggtagctaaaagctgctacaggccatggaattaatggagttttgagtcaagtttacccaaacccctaaggggcagggaggcctgggatatctttatttccactctcaatgtacatgaagtagaataactttataatcataagtaagttgaaacttaagaattttttttatcattctcattttaacatattacaaaacacatgaacaaatccagagatcccaaggctgtgtgtgtgtttatgccagtaagaacttgtcataaatatcggtggaaaatgacactttataccaaagcaattttattgctcagatttaggcatatgtaaataaactgcatttctagagtaaagtagcacatacagattttgtgtatttttaggcggatgtatgcattttatagactctgtaccttcctaaatactgtgtctaaatatggcttcgctgagagaccgactttccctccccctcttaattctttgctggccctgatccaggtcttctctgcatcatgaattatggtgggggtgttgtatttacagaattttaaaacctaagacctgcagacggcttttggggaggtctagaacctttttaagttatgtgcagaattttgtgtacctgtaggtctatgcatttttctaggaaagggggctttccttatgtttgtgactctaagagataaagaacactggctggcatatggttactcgttgtttggggatcttgggaggcaaaaggggtgcctaagagttccagttagtggaatggataggaaatgatgggtataataaacggaggaaaaaacacaacgctgtgttgtgaggaaagagggaaaaggacgttggcataaaatggaaggatacatgtgcatgtgttgttatgctgggcccaggaggtaggctgtgtggcagtttcgatgtcatacgcttaagacaacagttctgcgaacagtgtattaaaagaatataggtgaggacaattgagtattcagaggggactggctggacgtggacggaattggctacctgaatggaaaacactagatctcaactgaatctgtcttggttacagaggaggcagttcttgctgtaaaatgggtgagggccccagtactggtgtgggttgtatttaggttctcaaatagacctattcatattgctcaatgccatgttctctcatgtctaatttttatgtcctacctcacttgcctgggatctctgactgtttaagtcagtcctctttagtcttcatcctgtctgtccccaaaatgtcttttttttttttttttttttttacccctgatactcttccatccttgtgtgccccccgctcccctttctgagataaggtcaagacccacagggacttagtctcaagggtaagtcctgtttctacagtctgtggaggatgacgggagagtctggtagagcagcaagccctacttcctggagctgttgttgccacattgttatagttgaaacaggcagtgtctggaaagaactgaatcctctgtgttttgcttgcctcacttgatccagtaaacattaggagaagaaattaaaaaaacaggaaaggataagatggcaggagtaagttgaagcatattgttaatcatagtaaatgtgaactggttaaattcagctacttagggacattttcaagttgatttgtaaatgacgtcacaaacgtgtatatgatggttatgggagaccacctaaaataaaggggtgacccaaaaggctgacagtgaaggggttgaaaaagatcaggaaatgctaaaagaaagcaactggtggtagtattgtcagtccgtttatgaaaggaataatttgtcaagaagatagttatatactttcattagctcacaacatagctttgaaagatagaacatggtaagaaattaagcaattcccagtcacagcaagatatgttaaccctcacccatcagaatttgaaaatcaactagacaaagaaggatctggctatttaactaacactgttaccaaacttgatgtgtccactgtgtgtgaactttgtgcagcagatcctcttggaatggtcatagaaattagccatgctttgtgccagaaaggaaatctcaccagattccaaaatgtagaaatctcacaggtcatattctctgactataatgtaataaaaaattgaagtcactgagaaagagccaaaagtcctgtccatttcatcccaagttacaaataaagaggaaatcaagtgtagtagagatgagtggcagagatggcactgtggggcacgtcttgtggatggggccgaaatgaaaaactttcatagccttcaattcatttatgagataaggaatatgaaactaagcagtcaaacaagctggaaaaaatactgcaggatttttaaattttaccaaatgacttttgggccttcaccaagatcatcatatgctcctgttcctttcatttgttaatgtactgagtcattttgaaatataaggataacatcttttatggtcataaagtattacatccttccacctttggtggatttttgaaaatttgcatgtgtgtaaccttaagagagagtctttagttatgaattgatttaatcagggatttaaaagctttctatcctccttattctggaataaattaaatagcacaggttaataactgtgcccctggactgtatgggcagtattcatacaagaaaaagtaataaaatctgtgtcccacttcacttgcctggagcataaattaaggtaacatctcatattgtttaaatcaaccatctgatccttgaaagtgatagaactcatccaaaatggctcagatccttgagggtggagcttagaagctttgacagtgtttttactcttttcaaaactaataggtcaatttagatctttcccccttatttttgataatttatagttttctaggaaaaaacctcccttttttggggaccttcaaatatattttagagatgtgtataactctaaattcttaaatctcattggcattttgataaaatcttacatctcccatcgtatgtttatattttccatttttttctttattggacttgccaccctctctacttccactcccccgaagaaccagacattggctttggtgatcacttctgctggggtattttcctgtcatatttattactttcttttattatcactaatcatatcctcttcccttccttaatttagcttattatcttttttctgaaacttttttttttagttgctagaatcccatgaattaatcccaataggctttattttcagtgatctagttccgggtcagcaaactatggccctgggccaaatctagctcatctcctgtttttgtatagcctccaagctaaaaatgtgtatgtttctaaatggtttttaacacattgatattttctgaatacgaaaacttaatgaaattcacattgtgtccataaatacagttttatgggaacaaaaccatgttgatccattcttggcttgtctgtggctgctttgatgctgcaacagcagaattgcagagttgcaacagagattgaatggcccccagagcctaaaatattctttctctggctttttaccaaaaaaatttccccatctctggtctaagtcacttgtaccaactggctggaagtttccagagaaggaaaggagggaggctggtgcttctagacaaagtgcaaagaaggatttactgagattgggaagagaggtaggctccatgaatgctggggactgagccccttatatgagatgcttcagaagtgagagagccaggatgggtcctggctgctgaggactcagtgctgtgcccctgggaacaaatagccacatgcaagcctgatctggaggaaggagggccctcctggctggccgctagcatctgtgtagatgacactggcttccacacgggctgctgagcaccaccagcacagggcagggcagaggcctctctcctagacagtcttgttaccacccaggaagcacattctgtgagagcagacttgggcgggatttgattccatttagacaaataaatgagactttttatgcattaaaggttgtaaatagatggataccattaaacttcattgtattattcagattctttgtattgcatttactattttcttacttgatcttgaaagcgtttaagggaactctcttccactatgcttctggtttaattttctctgtatttctaattctgtgcagttcactttataaatatccatgattttgtttcagttaggttttttttttttttttttttttttttgagatggagtctcgctcttttgcccaggccagacggtagtggtgctatctcggctcactgcaacctccgtctccagggttcacgccattctccagcctcagcctcctgagtagctgggactacaggcacccgccaccgcgcctggctaattttttgtatttttagtagagatggggtttcaccatgttagccaggatggtctcgatctcctgaccttgtgatccacccccctcggcctcccagagtgctgggattacaggcgtgagccaccacacccggcctcagttgggctttttatgtgtgtaaaataccaggttcatcctgttcaatggtgtttgcttgagttctacattgatatacctaccttcactcctaattttgttgggtttgactaagatatgtttatctcttaaaattatcttttagtaattttgtatttggggaaaagtatgcgcacatcagacaattcagagaatagtctagcctgactctcattcttgatttccagatcccctgccccagagcagccactttccagtgtggctttcctgagatagttcctgtatacacaaatggaggtgtgcacacacatcctgctgtttcccgagaacatgattgcattctgtgcttgtgctgtagcaatgtcaattttcagtgagcagtgctcctagtgactgttagctaccagtgcttgcattttttttttgatggctccattacttcccgccatatggaaggcctcagtatgtatcactaggcctctgttgatggaagttcccctgtattttcttctactacttttaggcttttgttttttacatttacatctttgatccatccacaatctttttatttttttctgtaaggaatatggtagactcaaatttttaaaatttccctggctggttagttattctatgactacttactaaatcttttctccacggatttgaaatgccaactatattacaagtcaaattcttatttggatctatttctgttccagccaaatcccaacttttaattactgggggtttttttttttttttttttttttttttttttttgagacagagtcttgctctgttgcccagactggagtgcagtggtgcctcctgagttcaaaccattctcctgcctcagcctcccgagtagctgggagtacaggcgcccgccccaacgcccggctaattttttgtgtttttaatagagacaaggtttcaccatgttagccaggatggtcttgatctgacctcgtgatctgtccgcctcagtgtcccaaagtgctgggattacaggtgtgaggcaccgcgcctggccagttactgggcttttattctttaatatttgcacagccatgccctttattactttttttccccagatttcccccatttattctgaaatgtttgatcctttccctttaaactcgattgtattttgtcttagctatgtgttttgtaaacaacacaggataaatttttttgactgaatgttaattcctctttttaataaggacactcaacacattatccttttttggtgatacgtactaatttttttttttttgagacggagctttgctcttgttgcccaggctggagtgcaatggcgttatcttggctcgctgcaacctccgcctcccaggttcaagccattctcctgcttcagcctcctgcgtagctgggattacaggtgtgcgccaccacgcccagctaatttttgtgtttttagtagagacggggtttcaccatgttggccagactggtcgcaaattcctgacctcaggtgatccacccacctcggcctcccaaattcctcggctgggattatagatgtgagccaccacgcctggccaatatatactaataatcgaatgagttatactattgccagttgaaaataccaaaaataaagtatgtttgtgtttttataatttaagtaaaataagtacaaacctcaattcctcagggattggtacaccttattttggaggaggggacaaggtgtttccatttcttagagtcaccgctggtccatacatcccgctgtttctgagttctgactcggctttgcatcttgactctcatgactctgccgccctgtgtgttactccatagacactgtggactcaggctgtgtatcggggggtgtcctttactgatggtttatagcaacaggagggttccgtctgcatgtaggaactgcatgttgaatgatagaacttctgttcttgcagtctctggccattcctgtccctgaggagtcccacagctgccctcacagcaggccttaacctcccatgatgctgttgggcctctctttatcttttttggggacggtggtgacaggatcttgccctgtcacccaggttggagtgcagtggtgctgtcatagctcactgcagcctcagcctctgggttcaagcaatcctcccgcctcagcctcccaagtagctgggactataggcatgtgccaccacacccagctaatttttaaactttttgtagagatggaggtagcaggggaggtctcacttttttgctcagtctgatttcgaactctcggcctccagccagtctcctgccctggcctcccaaagtgctgggattacaggcgtgagccaccatacttggcttccttccccattcctgatctcctctctccttcctaacctgcctgcttaccctaaatcccccaattcctgccgtgtcttatagagagcaatctagcaatggccctttcttcttcataccatctttggctgtacccactgtgtcccacgccgataaccacacacattgcaatgtggttctcaaccgtcacagaacctgggagagactcggaggcctgctagtgaagtttaacctgcttttatctcctgactacatagatgtaagtaacaggatgcatggctgaagagtcaatgtgtggtttttcctttcttcctcttcaggacagctggaggccaggctctgtggttgtccttagctgggtgcggcactgctaggccctgcaggcagtgggagggccccgcatccctgggcccgaggagtcacccttagctggggttgccagataaaatgcagactgcctagttaaatttgaattttagatacattgaaaaatatttcttgtgaatctgaaatatgcatttaactggctgtcctgtttttattggctaagtctggcagctctgccctcagggaggctggcaaggggcgctagtattccagaaaggggtggtgcaggacagtgtgggctgggtggagacccctcttgggctgggatgtggacgtagagaggcctttcttgttcctgcagtaaagagagaagctgcatgcccctgaggacatgctcccaggggggacagaagggaagaacattgcaggttcacaagaatgaatcaggtcctgggtatctgggccttagggaatggctgcatgggccagggcaccaagccagggcccccgggccatgtggcccgccctccttggaaccacagaggacactagatcaactttaggtcactgagctgtgcaaggtggaacctcttgtcagcggcgctcccccagtgacaatggagcggagatagtggtggacccatgagaccacctgcaagactccagggaacccattttctggaattttccaagttgttttggaataattcagagggggaagaggtggcagccctgagaggaagctagaggaccaccttccccatggctgcgcagatgaacgtgggttggagaggagctgctcatgctcggagctcatctggatttactgatttaccccacacatggtcacccatctgccatgcaccaagcacccttcaagggcggcacggacgagaacaaacacagccttgcctgcgtggaggtcacgctctgcagggtggagaccactctcatctgcagggccccttttgtcatgttgtcacagggatggcggggggcccactgcgggtgtgatatgctgatgggcaactctggctttttaaatattttagctccgtggctgtgctaaaagctatattcagtccctatttttcctcttatttattttgattgataaaaattgtatatatttatgtacaaggtgatgttttgaaggacatatgcatcgtgggatccccacaggatttgaccctcgtacagagcagagcaagcctccttgacaaagggaaggcagcagtgaagggtcagaggtgctaatgaggtggagaggaaggggaggcgcttgacggggagcagcacacgcagaggcctgggttggaggggcttgcttgacagacggaaggaaggaccttgagacagggcagggaaggaggcggagtgtcggggaagggagcttggagaagcagggaagggatggcccttcagggccttggttagggtttcagtctcatccaaggacagtgggagcccccaactccccccaagtggttccagttaggtgggggcagtgctgcccagtggagaggggtctccactttttggaggtgggagggaaggcacagagataatgaaccaaggaaagggccgcacagtagctgagaagtgaggaggccagccctgggggcaggcggtggcagagatgggcagaggcatatctacaggaaggagatttgggaggaacaatccatagaacttgctggattggatttggagtgcatgttagtttcctatcgtcactgtcccaaatcaccacacattttggaggcttaaagtaaatgtattctctagtagttctgggggtcagaagtttggagtaggtccaaggtgttgggactgtgcaccctccagccgctttcagagagcatctccttccttgccttttccagcttccagaggcatccgtgttcctttgtcccttggccccaacactctgacttctgcttctgtggccacgtctcctcctctgactctaagccacctgcctccctcttaggaggacccttatgatgacacaggggccactcagatcatctaggaccatctcccttctcaaggtccttcatcacatccgcagggccccttttgccatgttggtaacattcccagattctggggattggggcgtggacacctttggggaccatgggtctgcccaccacaaggagtaagcaggaaggactcgtccaggaagattcccagtgtctggctcatgccatgggatggtgagtcgtgccactttttaaaggaggaagcatcaggagaggaccaggtttgaatgactttgagttgaatttcttcccaacatcgaagaagacactcaagtcggcagaatctgcaactgtggatctcaaaggagagtcctggatgtgtgtgtcatccgtgagcaggctatatatatacatagtctctctctatatagacaggaggttattttaaggaactgactcatgcagttgtggaggctggcaagtctaaaatctgcagggcaggctggcagccgagccccagggaagggtggatgttgccactccagcctgaaggctttctgaaggcagaatcccctcttcccggggaacctcagtctttttctcccacggccttcacctgattagatgagacccacccatagcctggcaggtctttggcttcactcaggggctactgacttcagtgttcatcgcatcccaaaaataccacagcaacatctaggcaggtgtttgaccgaatatctgagaaccatgccaagccaagctgacacataaaactggctgtgacactgcttatcagtcgcagtgaatgacgcctccctgcagtgagtgtccaggccccacacccagcagcctccttcatttcccttttcctttcacatctgtcagcaagccctgtcaattctgtcctcagaatacaccctgcatctgttcccatcttctgagctaaaaccctcttccgagccaccaccacctcctgcttgcaggactgcagccatcgtcagggcctccctgctgccctgcgggcctgtgtctgcctctccatctcttacctccatccacctgtctctgtcactctgtttttgtattgtctctgttcatctgtctctctgtctctgcctctttttatctccctctctctccctgtctgtctgtgtccctgtctctttgtctttctctgtctttgtgtctgtctctttctctctctccacaagggcctggtcatggaggatggcagtggctggggtctgagggagaagacgacaaggacatcacatagtcataagtcttcccctgtcacagatccattagagatagaagtgccaagaagacgcggtcctcggggaggctggcattgacatggccaaagtgacactgctccaccagaggcagccaagccacacggtgtgggagagccagggactccaggggagccgggcagacttgggggtggcaactgggagcagcagctgagcccgagggcgtggcagcacccaaggtgctgcagggttggatgcagagtgtggtgagcccagactcaaagtccctccaccacatctagctgtgtgaccttgagcaagtgtctttacctctctgagcctcagtttcctcatctgtaaagtattgtactgacgaatgacagtatttatctccggatggctgcgaggctgaagtgagcttaagcaagtgaagtcctcagctggtgtctggcacagagcaagggctcagtagatcttagctgttattattactatccccaggaagtggcagtggtcccaagtgttgtgatcttgcagaaaggctggcactgcccgtcagagctggctgtcccagtgaaggtgacaacagctgagcctgcatctggcagagggagcagggtctggcagacctggctgtagctggaagcgtggtggcagcagtgggttggcagcggtgtggtggtcatttgccggcaggcgaagcgctgaggtcccagagtgctgcccaagagccccgtgtttgaaggcactgggaggtggtccctggtgactccagacctgctcaggtagattttgcagggagccagggccaagcaaaagcaggagggggaaaaagcatcttttagttccctttctctgaaagcaaacagtcacaagctacaagcctggggcttgtgaggatcgccaactcttctgcgcaccggtgagttcttgacaatcagatgaacagagggaaagaggcgtgcccttgctagccaacttcctggagccctctcagctggcatcttggtgcttgtacacatttgagagcatcagcatttctttacaaatgaccccatcagctcgccagtcaccttgctttgctggaagtttgccttgggatttgggagaatttagttgaaaccagtaacacccagcgtggccaaattccatatgctccttctgcgtctgtgtaacaatttcctttctttttttgagatgattctcactctgttacccaggctggagtgcagtagcatgatctcggctcactgcagcctctgcctcctcagttcaagtcattctcctgcctcagcctcccccaagcagctgggaccacaggcgtgtgccactacacccagctaatttttgtattattagtagagacagggtttcacgatattcaggctggtctcaaacccctggcctcaagtgatccatctgcctcagcctcccaaagttctgggattacatgcgtgagccaccacactcagcctctatgtaacagtttctttgaaatttgtcggaagcaggttaccagggagaaataatatttttaattattctttcatttatttattgtttgtacattttctgtgtgtgcattcatctgcaggttgtatcttggaatagaccccgcagagacgtgcaagtaatgacttcacattaacgtgtcactggcctgcccttgatgtgttggggggccgggcaagagtacaaatggagacccacctttaaaagtcataaatcaaggcaggcatggtggctcatgcctgccatctcagcattttgggaggccaaggcaggaagatcgcttgaggccaggagttggagaccagactggggaacatagtgagaccccatctctacaaaattaaaaattagccgagcatggtggcacacacctgtagtcccagctacttgggaggctgaggcaggaggatctcttgagcccaggggttcaaggctgcagtgagctatgattgcgccaccacactctagcctaggtgacagagtgagaccctgtctcttttttttaaaaaaagttataaatcaagttagcaaagcaaatcaagttaacaaagcggttctgacaatgaactcttcagaaccacctggaaggccaagctttggcctttgggatgcggggactcctgagctccccctgggttgtggtgggcagtaggggctggcatgtgtcccacctgcctgtgtccctttttgctccacatcccttcctgccccacccgagtcctcctggagtccacacgtgtggacacccagcccatgattcgagctctggccatccctccacaccaccccatagctgcccccttgcaggcccatgggcagggccgtgggtaccagcagcctgctcttcggaggctgcatctgaagaacgggtttgtgcaggctctgaaggaacgcctgcgctgtttcagaaggaacctccagtgccaggaaatttggagcctgatacagaagcaacattccggtttggcacattcccttgaccctggagaggctgtgagtggggccctctaaagcacggggcccaggacagagacccctctcatccaggttcaagggagcgcagactgaccgtccacctccacagatttagttagcaaaggtatcaaactagacaagccccggggaaatttctgtccctcgtgagtaagtaaaaatgatatgtatcaaacagtaattttgaggaaaggaaaaaaaagacagcaaaactcatacgatctcatctcaggttacagaatcttaggcgttaactagctgatctcatgtcacaaaaagtccgggtaggagagtcagcattttggggtcttcatccaattccccagtgccctggcttcacactggccagctcatttgacctccccgaggcagagcgacaggaaagcacgtgactcatctccttctagcgtgtgtctgtcccaacaaagtcctaatcaagatccccgagagatcctcgggctgcaagatgcctgggaaatatcaattgttgtcagcctcacaggctccatgcagggaattcctgcaggctcagaggcctttgtcatcagggagcttgcagtcaaacgacttgtggttttcttcagcacttcggtatcggccaggatctcttttctttttctgacactctcagacaaaatgcacagaacagtttacaagcccctccaagttctctagtccctcttgataattgcctctgaatattgacacagttttaatatacaaatttaatacgcagagggatggtagatgcgatgacttggataatccccatgagcagggaataataaaatagacacgtggctttggaattaattatactttatttggcttcatgatttagttttgaattatataattgactttatattaagtaaatttaagttacataggtggttgagaaagaaccaataatcaaatggaaaaaagccaacctggggttcatttttgttttccttcgtgcggaatagaagttgctgattcactcgtgggtggttgagtgttattcatatactcaagagcttatgttctttgtatcatttgtttggggtattttttttaagttccggggtacatgtgcaggatgtgcaggtttgttacataggtaaatgtgtgccatggtgattagccacacctatcaacctgtctcctaggtattaagcacagcatgcattagctattcttcctgatgctctccctgccctgtccccaccaataggccccagtgtgtgttgttcccctccctgtgtccgtatgttctcattgctcagctcccacttataagtgagaaggtgcagtgtttggttttctgttcctgtgttagtttgctgaggacaatggtttctagctccatccatgtccctgcaaaggacatgaacttgttccattttatggctgcatagtattccatggtgtatatatgtaccacgttttctttatccagtctatctttgagggacctttgggtagattccatgtctttgctattgtggtttttttttttttttttgagacggagtctcactctgttgcccaggctggagtgcagtggcgcgatctcggctcactgcaagctccgcctcccgggttcaagcagttctgcctcagcctcccgagtagctgggactacaggcacccgccaccatgcctggctaattttttgtatttttaatagagacagggtttcaccgtgttagccaggattgcctcgatctcctgacctcgtgatccgccgcctcgtcctcccaaagtgctgggattacaggcgtgagccactgcacccggcctattgtgggtatttttaaagaacacaacatagtgaaaggtgtttgtttttcttttacaaaacaaaacaagtctaagattgaaggatttgctctgttgttcccatgttcctgggactagagttgctattgcctttattagcgttggtctattttaaaacaacaaaaaaccaaaccaaaccctggaggtatatttgattagcatggaagagttaaatgccagagttatcgtacaaagagaaataagagacgctgagcattataaagacctgacaagtctatgctgcgtgaacagaggctgaaaattaagccctgggtgacttcaagtacagctttgggaaacgatgcagggagctgtctgggaatgaagggatgtatgtgccccctctagtggtcaaaagaggtggggttgggagctacgctttggattctttaccccccagccacatacaactttctaaacttttttccttaactttttttctttaaaggaggacaaaaactgccaccctccactttgttctctgaattgcttttaaaagacagtttttaaatttgtccataaaacatttttctgactcaccacaatgctgtaaaagcaaccactccaggagtcacagaaccccgtggtctccagtttcaaccccttctctctttatgcctttgtaaaaatttgtatttagttcatttttttagggacagggtcttgctctgttgtccaggctgtggtgcagtggtgcgatcatagctcactgtaacttcgaactccagggctcaagtgatcgtcctgcctcagcctcctgaggagctgggacctcaggcatataccactacgtctcactaatttttgtattttttgtagagacagggtctcactatgttgcccaggctggtctccaactcctggtgtcaagcagtcctcccacctcagcctcccaaacatgttgggattaaaggtgtgagctactgtgctcagccccagcctttcttatctcatttaaatgttgaacctgatgacccaaacacatttactttgtttcatctatttaaattctttgtaaattctatgaactatatagcaaggctagttctttaatgatcactcacttgcaaaataaaaaaaaaagatataataatgctaataagacttttgtaggaggtgatgtgatatacaaaataaaagcgtgatgtgatttcctcaggcaatttctttgggaaaataaaaaaggaagttgatagtctagtggagacatcagattagaaacaattacttcatttgtgccgtggactgaagacacagattcccttctgagagctcaggccattgtgtatcaatcataccacaaatgggagtgttttaaaaactctaaacaactgtttggtgaaacatgccaagaaccacctctgagaaggcagcctattgataaagtggttctttttggctctaaaaatcccaagcacgtgggtgaacaggtgcacatgatcttccgttctctttttcctgtggagttcatcaatgactatgatctgacagaggaaagctctgctaagaacataaggagacttaaaagatggcgaggtggcacagcagcttggaagagcaggttttagtctagagatgggaagttttgagccttcagtggttagaaaaattccttctcctctgccttctctccttcccttcaaggcatcgatgtgtggaatataaaccatctttatattttagaggttgacatcttgtcttacagcaattcaaagggaaggagacatgcagccccattcaagcacaggacgtggacagagtgtccagggacttgcgaaagtgagaggacaaaactaactaaaaagccacaggccccaatctaccagatgacccagtagttttacttctgggacagccctgaagaagtgaggatcaccttgctaggggctgaaaatcaccctatctagggtcctgggagccaggagaggctttctacagaagggctttgagggatgtgtaggagttcacttgacaggtacagtgagaaagcacactttaagcagaggagagaatatataccagtggttctcaacattaagcctacatcagaaccacctggagggctcatgaaaacaccaatctctgggccttgccccccagtttctgattcactgggtctggggtaaggcttgggaatttgtttttgtttttaacgagttcccaggggatgctgacgctgttgttctagggaccccactttgaaaactgtaaacttacatgaagaactgaagcatgaagtcacagcctgcgtctggggaactgtaactacctcgttgttgctggaatttgaattgtctgagcaatatggttagagggttagggaggagtctcaaatgccgagctgtgggcatgcaaaataaagaaacgcgccatttgtgcattccaggagcaggcggcgctgtgctgctgtaactttcaatcccaattgacatgcccattttccagaggaagaaattgcggaacacaaggttcactgattggtccaaattccccatttaagtaagtgatggatctgggattctaaaccgggcctcgggagacgctaaagccctttttatctcccttgccaggggctccatgctagagcacttaaaattaaatctccgcaacagaggcattggggagaaaaataatcaggaaatatcttgggcaggagattataggataggtcggaaggggcttacaccagaccctttgggagacccgcaaaagttgaactgacagactcttgagatgtgatgtggccgcagagctggagaaggccgattagagaggagagatgggagggaggacctgggaccctgctggctgataggttgtggtgcgtaccattgaggccttgactttggagagatacctggtgaagccagcgagaaaggcaggaggggtcggaggggcacgtcatgaagacgtcctgggacacgaggacccacacgctccctccttcccggttacccagcctttttctaagcctttcgtcattctgactggttaattttgttatcttttattttctcgtctcactcattctctttgaatttctcttctgtcttcatgctcattatcaggctagcaaattgttaactatgtaaattttaaaaggaaaaatgtcagcaggcagctggacaagacagaagagacagaacttcaaatgttgcagtccaggctccttgggagagtatgtcctccttctcatgaacagggagagcaaatggtgtaactgacacccctaagttcatcacgtgggtgtcatcattacaacactttgcaatattagcttcattttctgccccctggagtattttgaagcatatttcagatgttataacacctctaaatactttagaatgtgtctctaaaaatagggacatcttcctactaaccatggcaccatcatcatcacacataaaagattaacgcaattcactgaatcatctaacaccaagtcaatattcagacatccctagtattgaattatctaacccgcagtcgatattcagatatccccagttattcccaatgtcttttcctccaagattttatcataaaaatattttcaaacatcagatgaattgaaggactcttacagtgagcatctatatatccaccacctagttgtggaattaccatttggctgtgtgctttcttgtatacctgtccgtctatccatctttccagtcacccattaatccatcttaatttttcagtgcatttcagagtgagatgcagatatcagcacccttccccctaaacacttcagcatgagtatcatttgctggagtccagtatttattaggttctttccttttgaggtaaaattgacatataaataaaagacccaaatttccagtataatatttgatgaattgagcaaatagttagctgtctaacccaaacccctgtgaagatagcaaacattttcatcaccccagaaggttccccatgtcccttcccagtcaatccccccactccacacaacccctgatttgactttttcctatcactgcatcttctggaagttcatataaatagcatggtgcccttgtgtaaggctgctttcacatggcataatgcttttgttatgtacccatgtcgtgtgtgtcacaatagcctgtgatttttattgttatggagtagcctgtcacatgatgtgtccaccatttactcatccatcacttgttgagggacatttaggctgaatcttccatttggcgatgatgagtaaagctgctatgaacattttcatgtacaggtttttttgtggactctcgcaaacgtctcctactgctggtttattttaaccatgatgcaatcaaggtcccaccctgcagccgattgttgtgcttctgacgtttcctttaattaagttgaaggggcccagtcaaaccccctgttgtagccacagctccggttacctgccaggcatacaaaggagctgagttctcagagtaacaacagctactgagctgcttgtgtagaccttaggcttgtgattggaatggtttcgttgtacacccgccggttgttacagggaagaaagactccaggctggacatctcagaactaaactaattgaactaattaacctaatctctccctctttctcatactctgggagtcagccatttttgttggtgatgctgcactgtttcgcagccacaagggggcacctgtgtgctttgtatgatttaaaattttcatttggcaattaaaaaaagttctcccagaaaatcagtattttaagatgctttccctgtttcccagtctattgaattcaatggtgacttttgttcaattgttcaatacgtatttaccgaatacccaccatgactaatgcattgtgctacgcactgtgggtggtgaagaaataaaatagttcctacccttgggactcttctgacccacagggaggagagagaaccacagtacagctcggcatgtgtttgaagtcagaagaatggggcgaaactgtggagattcaggtgggtgggagctggcatcgcgatattccgggaggccatgatgtcaagagcaagtgaagagaccagaaggttctggaacccaggatctgttagggatgctggaagggattcgatggtccagagctagggaatttggaacttattcatgatgttgaatgacacgggggagttttcagtggggaagtgactggtagtattgaattggagaggaaagagaagaggcaggaaactctctgtgggggcagtttgggggtgatggggcccatgctggggtgaccctgggagaatggctgagaatcatctctgagtgctgtaggaatgaatgagaccaatggagaggagagagagaacattctggaatccttctggaatgactgaaaatcatctctgagtgttgtaggaatgaaggagaccacttggggagaggagagagagaacattctggaatgttctgagaatcattccagaattactgcagaccacttggggagaggagagaaagacaatatcctggaatgttcttggagcagtcttattttgaagtttggttttcaaagtcaagtagctttgcattatatgaaaactttcactaagatacttccaagtagggtcagtggcgagttgttctgcccgttaaagaaaaaattctcggccgggcgcagtggctcacgcctgtaatcccagcactttgggaggccgaggcgggcggatcacgaggtcaggagatcgagaccattctggctaacacggtgaaaccccgtctctactaaaaacacaaaacattagccgggcgtggtggcgggcgcctgtagtcccagttactcgggaggctgaggcaggagaatggcgtgaacccgggaggcggagcttgcagtgagctgagatcgcgccactgccctccagcctgggcgacagagcgagactccggaaaaaaaaaaaaaaaacacgtaaggaagacactattcaggaccattttgaggggtcacgaccgtcacagtaggggagagagatagggctcaactccgaaaacagcaaagacagctgtagattatagtcaagaggcagagtgggtaatggaggaaaattactgagaggagacagaacctgaggatgaggcctcctggggaagaggactctgaggaacctaacatttgatcaaggacagagtctttgtcatgcctcagggattaatcagatcttttgttaagtgcgaatcccagcaggtgaagtgggatgtattttttaagtgggaagtattctgattaaacgggagcatgaggcagtgaaatgggataaatttgttttatgcaagatgaaacactaaatcacctttatacaaatattcatacaaatatttttatacaaatatgaattttttatacaaaaatttcagcattcctgaaattataaatcagtgggaaaagtttgacttaaaaaataaattcagtggcagataaacaattcaagtgattctttgtttttacctttgttgaaagaaatggtattagtaacttaaaatagatttgtttaaaaaacgaaaatataacgtgtttttggtccattgaaataaggtgatatgacagtcacgcccaggtccccaattactaggctgatttacataagcatgatttaccctgatttatataaacatccatccttccctaatcactttattaagtttcaggttcaaatatttccctgaaacttttttcagggaaaaaatatacattttatatttatatttttaatatttttttttcccactttccttaaaaatctccttttcatcactaaagggcagttcagccacaggctctggattcaaatccagcaccttctcatgttagctgtgtgactttagtttccctcactatcaagtgaggataataagagggtttcctcaccggatcagaggagtgcccagcaggggtgggcacagctcctggcacactcactgtgattgatgtttctggttgacgttgtcttcgacccaagtctgcttatgtaagatgtgagcctggctgattaactctgctttgtaaattaaaagggaaatcttcctttttccaacttgcccaggaagctttggtgtgtccctacgtgttttcttgtatcatgtggttaagggtgacttgatccaggaactcaaaagatcctgttaatacttctttttaatgggatcgtccaacctttaaaattcattcaccccttatatataaacccacagatgttaaaaccagaacaaggatgtattcacggaggaaacaaattccatcttcaacacagcacttgcagaggtagaattaactcagaaagaggctggacaacttggcctggaacccactgtgggaaactttggtaactatcagctgtggtttgcttttctgcaccactgactcagcaaccctgcagttgggcactgggtgagtttgcagtgggagagaacaaccttatcctctctttgaaaaacatttccacccacaggacagcttattgggaggaccagaactccgaaagaatgaaaaaggaaaatgaatgaaaccacatagattttgtttgctcctagtgaaacaggaaaagggaataagaaccaaaaatttagtatcattttgcctggatgattttttcagttagctagagaaaaagatttgatggctttaatagggattaacagaagtgatctttcagaaagttatagatacttacttttagggttttcttttccccccaactagcttgtctaatgtaatatacatcatgataaataccttttttttttttttttgagatggagtcttgctctctcgcccaggctggagtacagtggcgcgatcttggctcgctgcaacctccgcctcctgagttgaagtgattcttctgcctcagactcctgagtagctgggactataggcacgtgccatcacaactggctaatttttatatttttagtagagacagggtttcaccatgttggccaggctggtttcgaactcctgacctcaagtaatccaccggccttggcctcccaaagtgttgggattacaagcgtgagccaccgcacctggtcaatagataactgttaatgaagtataatgtgtttttatggatatatttctttgtaagcacattatggcctttcaattcaaatacaagtgtttctgattgaaatcttgaaggggcaacataattggatttgaccaaatatgggatttagaaatggaagcagattcagccagaattcctgcctaggacttcctggggatcagggaagaggtgaaatgcacaggaaatgtcttctattgaacgtgagggcatgttgatatcaaagggcccgggagggccacacactatgaacgtgatgtccacattcttggcggtgctcacggcagtaacgtgcatttcctgtgcggggctgcctggctccgtcatagcttgccgagtgtcccaatgctgttatttcctcctgaggcaccactcttctcgtttccaattttgtttgttgttttttaacactgtagagttttatttcagtctacctacttgatctcttatttcattagcattttggggtgttttgaagggattttataatacacccatttttcttaaaactttatatcttttagttaagtcgataaatgtttaatatatacccaattattaaaaacactttaatgcatagcatcaaagtcaaaatagatgatacatattgtaaattccatgttgcagaaattctaaccttgattttgagaagtaaagcttacttcttacagctaagtaaacccccagagataagtgcagttttcacaatagtcattaactacccatcacctgtcattgcaacattgatgaattactggtgatgatcactgcttgagtgttcacaggcatgtaacgattatgtccagttgagagtcagaaaaaagctccggggccttttgtatgcatagataatgtattctgaattatttggatgaggctttataccagtcagggattttgcttgcaaacagtagaaattaactggctaacttgagcagaataggacctttctagaaggatattgggcagcgtttggaatggagaatcaggttttattttatcattttttttctatttgtttttgagatggagtctcgctctgtcacccatgctggcatgcagtggcatgatctcggctcactgcaacctctgcctcctgcgttcaagagattctcctgcctcagcctcccaaatagctgcaattacaggcgcccaccaccatgcccagctaatttttttgtatttttagtagagacggggtttcaccatgttggccaggctggtctcaaactcctggcctcaagtgatctgcctcctttggcctcccaaagtgccgggattacaggtgtgagccactgcgcccgactgagagtcaggcttgtaaaaccggtaagaccaagagcagctaggcaggtcaagggtcacaggtacaggctgatgtggacgccgccataagtcctgccattatcagacattggccactgccctgggcaatctgtcctggtctctggggccctgcagcctctgacacttgctgtcctgatgggcctttggtgctgtcctgctgctgggaaactccccatcactggatctctgtgtcacagcctcaagggtcaggtccttagtgtgggcatctgtgttagcgccctgtagttgccatatcaaagcccacgtgccaggtgtcttataatagcagaagttcaccctcacaattctggaggccagaaggccacaggggcacgtacccactgaggccctagggaggaatgtgttttgtgcctctcagcttccgggggccgcggcaaccctcagcttcagtgggcttgtggatgtttcactcctatctctgcctccatctccatgtggccatcttccttctgcgtgtgtctctgtgtccagatttccctcttcttagaaggacaccagtcatactggatttagggcacaccctaatccagtatgacctcatctgaacttgattacatctgcaaagtccttcttgcagataaggtcacattcacaggtaccaggttccaggctgaggccacatgcctacgccacagctcccggggctgggttatctgtacctcagccttcgttggccgtagcgggtggtgggtccctgcctcacagcaagccccacggaatggggggttcccccagataggagggatgcttgacattcataaaagaggctttccccaactatacggcttcttgcagcaatgagattacaccatttccatcagcacaccagtaaaattgaacaatcactagggaatatctttaattctttcttctgcctttctttttattatcttgttttaatcatgaatgattgcggagaaatgttgatctgatggactcaagttgaatggagtctttctcccatgtgaggaccggaagccacccacacagatctctcttctatgggaggtgttctagggtcaccttattaatcccaaattctgtcttaccctgagtcggaactctttcagcagaaaactgtatctctgtggcgttgaatatgaggataggttccaggagcaccagtagacggaatgtttgccctgtcacaagcatttctcctggcctagagactggcaggggttcctgcatccctaagcagggacccctgcaccaggcgaaggacgagcccccttccagcaacgcgggatgagccagggcctctcccctaccctgcttgtccttcctctgcccagtaccctgcgtggctgctcaggagagtgacgtgtggaagccactcggggtgagcagagggtctcttagtgatgctgtttgtttcctgggacgtgggtcagggagcccctaccctggttgagaaccactgaggtaggccgggattttggattccatccccaaattagaggaacagagtgcatgcatgccttaggcactagaggtgcttccactgggcccgtttgcacaagtctggcctctccctgtcttttgctgccacctgtttatcactggtcaagagaggccaccgaggccgggcacagtggctcatgcctgtaatctcagcactttgggaagccaaggtaggcagatcacctgaggtcaggagttcgagaccagcctgggcaacatggcaaaaccccgtctctactaaaaatacaaaaaatagctgggtgtggcagcaggaacctgtaatcccaggtacttgggacgcggaggcaggagaatcacttgaacttgggaggcggagcttgcagtgagccgagattgcgccactgcactccagcctgggcaacagagtgagactccatctcaaaaaaaaaaaaaaaagaggaaaaagagaggccaccaaatgcacgatggagctgctagggatgacagcaccgcaccagaagcagaagccccagacttcccaaggagaagacaaaggaacagctctcctgtgttccttcatatttttattgtaggtacctcagctccttaatgaaacttaagtattaggagaagagcaaaattaactcaacaaatatttaaagccaggccctgctgtgagaagagaaatgaacttttctttggaaacaaaaatctctgctgtcgcggggtctgtcctctggcaatgatgagcttggtgctggatataacatcataaaattatcgtgaccgctgctctgggggaagctgctgtcaaatgattcagctctcctcccaagctttagatctctgtgtttcctttcggtctcctctccttagcttcacaccttacagtctcagagagcaggggacacagcacctcagaaagccacgtggctgcactctggatcatgctggccttagcactgttaagatactgtgagacttgggcaacccctgaggtgtccaagcgctggcttctgttcataatccctgggactcaatggttgtgtctgggcttcagtttgaagcccagaccctatgcagctcttcctgtgtcctcctgaagagggttgcgctttggggattttcaacgtgcagacaaaggaaatggttgcagctcaatattgcacacgctgtggcaaagtatccatttctcccctttcggcatccaaaaggtcttgcctcctggtggctgctttgctgtagggttgagggaaggatgagaagagctgcgtgttgtgacagttgctatgcgtctttgggagtttctgtggtaaaaactggagttatgtggtttaggtgctggatctaagactttaaccaggggatgaaaaggctaggtgagtgccctgaattgcgggatcgctttctgaccctgcagcccatgaggcccaaggaataatcagctgctgctggacagaggggagccagcacctcttcaggcaagcggggagtggtccatgaagctgcatgtggccgggcgccatggctcactcctgtaatctcagcactttgggaggccaaggtgggcagatcacttgaggtcaggagttctagaccagcctggccaatatggtgaaaccccgtctttactaaaaatacaaaaattagctggccatgatggcgcgcacctgtaatcccagctactcgagagactgaggcaggaaaatcacttgaacccgggaggtggaggttgcagtgaaccgagatcgcgccactgcactccagcctgggtgacagagggagactccatctcaaaaaaaaaaaaaaaaaaaaaaaaaagaagaagcagctgcatgcacaggcgtgttccttcccagaacagagtctgcagagtcgggtgacagcagtgcagtcgggggcgagcagagggagaacatgagagcgcctgtttatgtgtttcgtgccacatcattgtgaaattttaatttttggatctatttttagggcatgtaacatataatacagcagcccatgcgacacacacacacacacacacacactcactcacacacacacacacaggcatgcagcaactatagaggtgtattgctcggatctccttttaagaaggagcttgctcaggcaggaagtgcggttatctggcagcctccagtcattcaatgtgcctcaggctccccctcagcttctgagcaggggcagcccggcccgacaccaagcacagcaggtgtccttgggcctggccatttctgctcaatgcgggattcctccagtgggcagtctttgctctggagcctgggtggggccggcggtggctgcccgatctgcatggcgttggaggctcgtctgcccactcctgtgcctctctcttatatcttttacaggagtcacctgcaattaacttcagcctcctaactgcatctcagtgtctgcttcctgcaggactcgactatcactgtgctcattttttttttcctggtagggatgcatgattaaaaatatttgaagatcctgttgcagagggtaccgtgggacgctttgagagggaagggaggctgctgaggagaattcctggctcctgcggcctcactgatcttctatcatgtacccgtgtagtgagagagggacacattcactcctgctttctaggtggaaaaactgggagcccacagattctgctaacttggcatgttataggctgggaggcagtgagtgtgccttgggattcaggcttgaagagtttattgaacccaagactaggctcatctgtttccaaaatggaaatgatgatgatgatattttgtagaccagggtcctaaaaggaggtcagcaggcagaggaaaaggcctctctttgttttttcatttcccactggcaatagctctttgcatgagtggctggggtggcgtggggggtggcagtgccactgcacaaacccagtctgttctgtttgcaaacacgtcaggggctgagcagggaaggacgctatttcacaaagctttcctgtggggcagagagaaaagctgcctggagagaagctctttgaaataagtgtcctccccagcccagcccctgaatttcttttcctttacataaaatctctgctcttcagtcttctttaaagaagttcatatgaggccagttaaagtgtcaatagggccaggcttctcttctctctagcacttccccaggcctggcaatacagaccctttatgcaatttcaaaaccttctgtgctttcagagcccttgacctcatctgtctcatctctgacagtgacaaacctcctcctctgaagagccagatgtcagtggagcaccactccatgaccctgggactccgctctgtgtgggtcttcccagaaaaccatgtgagcactaatccctgatatcaggctgaggcccaaacacactcccccgtccaagttaccttcccagcaaccatcctcctgtcttccttgatgatacagaggccagattttgtttgggtgtctgcatgtccagccctaggatgaatcatgattaaatcagcaaggccattctgttccctttgatagtgattggtctttggggtgggcctgtgattcaggtttcacctgtgagacatgaggacaagtctcatgagagcttctgggaaagattttccttcaggacagaaggggagaagagctcaatttctgtgaattcagctaccactcaagttctaatgaattcccaaactaggtcaagtcatatgaaattgctaatatttgactgtttttgacctacaaaaatatgacagtttcatatagtccaccctactacatctctttcccaggagaaatagaataaagagaaaaaagcaattaaagagaatgcaagaatggtgagcgtcaaatgtaaggaccaatagtgacctagaagtagagaaatcaacaaatggaaccaaaaaggtattcagagttggaagaaatttccctggaaatgaaggaattgctgaatttcagcttaagagagcatactatgttgctggaaatatttagaaagtttgatggacactaaaactacttggttttagtcaatgagctttaggtcagttaataagctttaggataaagaaataatttttcatgtatttgagcagaaaaggtaagtaatatttaggaagtataaataagactttagacgttccacatcaatattcagagcaagaaaacagtgaggccatatccataaaattctgagtaaaagaatgtgcaaccaaggcttttatacccagccaagttgtcatataagcatcatgatgtgacttaagtcaagggtctccaacccctgggtcatggactggtacctgtctttggcctgttaggaaccaagctgcacagcaggaggtgagcagtgagtgaagctttatctgtatttacagctgctccccatcactcacattaccacctgagctccacctcctggcagatcagcagcagcatcagattcccataggaatgcacaccctattgtgaactgcacatgcgagggatatacgttacatgctccttatgagaatctaatgcctgatgatctgtcactatctcccatcacatcaccccgagatgggaccgtctagttgcaggaaaacaaactcagggctcccactgattctacattatggtgagttgtataattattccattatatattataatgtaataataatagaaaaaaagtacacaataaatgtaatgttcttgagtcatcctgggatcattccctgcccccatctgcagaaaaactgtcttccacgaaactggtccctggtgccaaaaaggttggggaccactgacttaagttttaaaaggataattctagctggcacgtggagagtaaattaggaggaatggatgctcaatggtttcccacataatgcaggataaaacccaaagcatttagcaaggtctctaaagccctccttgaccaggccaactactatattctgactctgtcttgtcacaactccccctctctcactatgctccagccactctggtatctttgttgttccttgaacactcttagcacattcctacctcagtgacttgcacttgctgttctggaatggtctttctcctagctgtctgcatggttcccacattacgttagatctccagtcaaacgtcaccttatctgtgagaccttccccaccaccctgccctcttttttctccagaaggcttatcactacctagtgtgttttgtatatttgatgacatgttccgtttattgatttctccttgcatttgaatgtaaaggcaacaagctctcattttcaaatattggaggactataatgtttattaagtttttttttgaaaaagttatttgaagataagaccgagctaatgcagagttgaatggaaaagctgtagcaaaataattaatacaaaatcagtgcaggcagctgggcatggttgcatgtgcctgttgtcctagctacttgggaggctgaggtggaaggattacatgagcccaggagttcaaggtagcagtaagctatgatgggaccactgcactccagcctgggtgacagagcgagaccctgtctcaaaaaaaaaaaaaaaatctgcgtaggaacacagtggagcaacatttacaaaattccagagagaagaactgacacctagaattttatacccagccacattgtccttatattataaaggcaacagaaacatattctcaagcaggaaatattcctcatgaaataaaatgaaccaaaaaaaaccacactattaagttggtcaattcctaaaactctactttcactttcttattctttgtttaaatccaagtaaaattaagtataatactttttatttaaaaatagtgtgtttagtgtgatatcacttttataaaacttggtctatctgcatgcctgcccatctgctcacccattatctacccacccacacacccactgcccatcttccatctctcttatacaagtagcaagatatttagaataacatccacctaatgttcatgaatgttatttaggggtagtaggagttggaaatttttatcttttttgtacttttctggatttcttgcgttttaataatggatgaggtatcaattttataaaaacaataaaataattcttctgcctctcctacctcccagtaggatcatttcagtctctttgagcacgatgttcagacttcttccttacctggcactgccaggctcccgggtctccttccatgcgccctccccaccccacctcctgaggcccaggcacccctcaacacaccctgctgtccctcattcctctgcatgctttgcacatgtggggacttctgcttgggaaggccttcccctaaccagcccctttacctcctcacctggccaacctctacccatcctgcagcctcagcctgggcctcaggtgacatagttccctgcattgtgtttttgtagagatggggttttgtcatgttacccaggctggtcttgaattcctgggctcaagcgatccacctgccttggcctcccaaagtacacagtgaatgagatgcatggttaaagcagggttaatcatgccttaaccatgcatcttattcactgtggtagaatgtcagctctgtgagagccacatgcatcttattcactgtgccagccactgacctggcacagagtcaatagctaataaattaacacaggagtaagataaggaggggaaacaggacagacagactataaatactaactggctgcccaaccagcttccagcaaaaattccatcctctgttgttgttcttttcattcgtctctcttagaaaggtaggatgactggaagattctcctgaaaggtacaggtgaaggtgaaatagcagatatggggctcatggcctgtgacaatgacaacgatggcattgatagcatcagctgcctttggtcaagctcctgccattagccagctgctgggccatgcaccctccgtgtgctcttgatgaaggtccctggaatcctaggcttccaaggcagtatgaggcaaccagaggtaagaagtgggaatggaagagccgagaaaaggtgtgatttctggactgagacaggaaggccgctcctggggtctctgtgtggtcgctctgccttctgtttctcctcccctgtgtccctgcctccccttccctgaccatccatgcaagctcccagcagggcctgctcctccacggggaactgcctgatcaaccttgcctcactttgagcactcgtcaacgttttatttccaaagagctattgtattaagttcaaaaatatatttgccatttatggatatatcaaatgttaccattctcaagtcatcaagacttttttttttttttttttttttttttttgaggcaggatctcactctgttgccaggctggagtgcagtggtgcaatctcagctcgctgcaacctgtgcctcctgggttcaagcgattctcctgcttcagcctcctgagtagctgggactacaggcacacaccagcatgcccagctaatttttgtatgtttggtagaaacggagtttcaccgtgttggccaggatggtctcgatctcttgacttcatgatctgcctgcctggccttccaaagtgctgggattacaggcgtgagccactgtgacttgcccaactgatgtttgtttttgtctctcaaggtgaattaaggttcctcaaagacagcaaatcttcatgttacttagtctcttctcacaaaagaaaactctccccatgagtaaatgtttgttcactgaatgaataagtaaaaacatttgcaagtattattttggggcttgggaaagttatccagttttgaattgacttggagtctagaagattcctggacaaaatggtttttcccattgtcaccataaaattggatacgtgtataaaaagtgggtggttcactaacattaaaaacatttatttttgggctgggcatggcagttcatgcctgtcatcccagcactttgagaggccaaggtgggtgaatcacatgagcccaggagctcaagaccagactgggcaacatggcaaaaccccgtctctacaaaaaacacaaaaataggctgggcacgataccactgcactccagcctgggcaacagagcgagagactccatctcaaaaacaaaaacaaaaacaaaaaaacccacaaaaattggctgggcgtggtggggtgtgcctatagtcccagctactcgggaggttgaagtgggaggattgcttgagcccaggaggttggggctgcgctgcattccagcgcgggcaacagagccagaccctgtctcaaaaagaagaaaaataattctttttgtcctatggctggaaagtgaatgttaagaaccagtgccaaaggtaagactttcctgtgattatcttttttttttttttttttttttttttgagacagagtctcactctgttgcccaggctggagtgcaatggggtgatctcagctcactgtaacctccgcctcccaggttcaagtcattctcctgcctcagcctcccaagtagctgggattacaggcgtgcgccatcacgcctggctaatttttgtatttttagtggagacagggttttgacatgttggtcaggctggtcatgaactcctggcctcaagtgatccacctacctcggcctcccaaagtgctgggattacaggtgtgagccaccgcgcccaaccctgtgtttattcttaggtctgtactacgctttatgcctcagtttccacagttaaaacacgttattttattcctcacgttataggagcaatttgtattcataaacttggccttcaccttcaacttctgaagattttaatacagcgcaaatgatttggggtctgtgaattcagttttatttatttggctccttcctttaaggagtcaggctaatgcaagaaaatccaataattagatcttttggatttcaaataactggaagaggaagtggtgtttatctaatggtttaggcataatgcgtgttttttcccgtaggcctgtgtgtgtatgtgtgtgtgtgtggttgttcttaacttgaagaattaaacacttgttttccccgttaattctttcctctggggcttttgtagacgttgtggaaatgtgacctgtaagtctgtgtctgaatacatgctgcagatggaaggaaggctgcctcccatctctcgggaaatggcttcactcagttactctttggtccaggtggttgagttaggtgaagacattagtatttcacttcctagtaaagtgactgtttagaaaaaaacatttagtgaggactgaaaaaactcttgctaaatctgtttgcttccatgaaacgacaggttttgagggatggggaggtggctttagcttgggctgtgggagaggtgcagacgaagagtctccaggacactcacaccaagtcatcagggatctaattttctggtgatgaagaaatcaaattgatccttcggtatgattttcccctcccaagaggcattcatatctccaggggttgttgggatttccataacaggcgggggaagtcgttttgtctcctgagtccccaacaccccagatgaacgtgtcaaaggacggctcccagcccggcgctaccatgatggattgagggccacagattctgttttctttttctttttttttttttttttttttgagacggagtctcgttctgtcgcccaggctggagtgcagtggcgcaatctcggctcactgcaagctccgcctcccgggttcacgccattctcctgcctcagcctcctgagtagctgggactataggcgcccgccaccgcacccggctaattttttgtatttttagtagagacggggtttcaccgtgttagctaggatggtctcgatctcctgacctcgtgatccacccgcctcggcctcccaaagtgctgggattacaggcttgagccaccgcgcccgggattctgttttcttttaagtgaaagaaaatatcagccctaccttgtctttagtggaggagaagatgaaagggaaagggcacgtggaaacgtgtgctgggtgcccctgcgccatctccctgtgtctggaccccagacacctcactgctccggaggtgctttcagtcctatatatattaacctgagcttagaaaggaaccttcaagctccaaaatctcctcccaggtcctggttaagagccttttcacaaattggattctgcagtcctgcattttagttgaaaatccccaatggaagctctctgaactacaaaagaagagacgaattaccaggatgccccctccataaaatgaaaaagccctacaagctgctgattagtcttttttcagctctaaaagtcaaggaaggtctcggccgggcggggagctcattcctataatcccagcactttgggagaggctgaggcaggcttgagctcaggagttcaacaccagcctgaacttgaactggcaacatggcaaagcccatctctacaaaaaatacaaaaattagccaggcgtggtggtgcgtgcctgtggtcccagatactcaggaggttgaggtgggaggttggcttggacttgggaggttgaggctgcagtgagccaagattgcaccactgcactccagcctgggcaacacagtgagaccctgtctaaaaaaaaaaaaaaaaaaatcaaggtcttcataactctaggaggcagagtggaattgagtctttggcttcaaggagagagtggagggaggcagcttaacaggacgagagtaaagtgaacagaaaaagcctctcagaaaaataaaggcaggcgacagcaaggagagaggaaaaacccccacctctcgcgctgaacagggaaatgggatagaaaacgttccctgtgatatgccaactgagaatcaactagatctgttccacatttctttctcctccttttccctttgtacatatttccgtgcagacagcttcaggacgcagttccggggaagcttatttcttcaaaacccccctctctctgctagaacaggccgtgattgctgcgtaccagcaagggggcagtcaagcacaacgcatgagaaacaaaggtccttcaacctccaagcccgcaggagagcagctccactcacttcctttgaagtggccctctctgttttttctaggatcgagaattttcctgtaatacactggtctatttttaaacccactttccattcgctagaagtaaagagtggaaaaatataatgaattgtagaaagaaacggaacataggtataaatgtcaatggtgggattttataggcacatagaaatctcccctttaaaagacactgcaattatttttagaatgagaattggtctcagggtggcctgagagaagaaatgggaaaagaacatttcaacttttactctacggttcaaaccagtgatggcggtttgccatcctcaattcagcacataaacatgtgggctgcccaccatccgtgagcgtggcagatactatgggagacgctaaggcgacttagacaggatctctgccctcaagagggttccatctaattaggaggggacagacagactcacaaatggccaaaacagaaagtgaagcccatcacagtcaccagtaaagtgcagagcaagtgagaagagggagggaccttccttcaggggacgggatatctcccattccgtggagctggtggcactggaggcagaccttgaaagatgacactgcagggacgggccggatgcccacccatcccattttctcttcccgggcctgtgttgcaatgaggttagagtcacgtggctgggccatgcgatagagccagtcagaagtggtggaagtgaaatatgccacttccggccaggcgcggtggctcacacctgtaatcccagcactttgggaggctgaggcaggtggatcacctgatgtcgggagttcgaaacagcctgatcaacatggagaaaccgcatctctactaaaaatacgaaattagccggccgtggtggcacatgcctgtaatcccagctactcgggaggctgaggcaggagaattgcttgaacctgggaggcggaggttgcagtgagctgagattgcgccattgcactccagcctgggcaataagagtgaaactctgtctcaaaaaaaaaaagaaaaaagaaaaaaagaaatatgccacttccatgtctgactgtaacaccccttgtgtggccatccaagctttccctttctcttccacacagagcccacatgtttaagataagtggtagaagccagtatccttgagtgcttgttgaaaagagctgtccaggagagctacccaacccacatcacactatgatgtaagagaagatagaattcagccactgagctgctggggtggtttgttatagcaagtggtgtctcttaggacagatgaataggttttgaccagtgaaaatgtgggacctcttccctgagtctcattctgccgaatgtgctgttattaggacacgcaccacatttacggatatcgcttgtttgaggccagccatccaagcttcactatttgtaccatgaaaaggacctcatctatcttgccctccctcccatccctagaacctagcacagtgcatcacatacagtcggtgtttaataaatggtttgttaaacaaaatgggtaagagggggctttgtttggggaacatccaatagtctagtttcaggaaagcataggatatttctatctaaaggagatgggcatttaggtgggcctctgtggggacccttaacagggtgtcaggagttggcgcttattttgcggggctgtatcctgaagccttccctcctttcctatccgctgcaatacttcatgggcgttttcttttgtaaacttcaataacttattactagttgcctgtatctctagtccaactttcagccttacttatcctaaaagaacaatagagagagagagagagagagagacctgtgatccctgtaatatgaacctgcttgtttaaagatgttagaaaacctaactcaactgactttaggttaaaaaccactggctcatataactgaaaagtccaggatagttataactgcttcaagcatggacagatcagggctctcaaacagtgttgtcaagaatttctgatttttctgcttattggaagtgacggcatgccagttctaagtttaggctttatttatattttatatttttatttttatttttgagatgcccaggctggagtgcaatggcacgatctcagctcactgcaatctctgcctcccaggttcaagcgattctcctgcctcagcctcccaagtagctgtgattacaggctcctgccaccacgcccagttaattttttgtatttttagtagagatggggtttcaccatgttggccaggctggtctcgaactcttgacctcagatgatccacctgctttggcctcccaaggtgctgggattacaggcgtgagccaccactcttggctaagcttaggctttaaaaagcatggcgtgttcccactcgccctcatgcatctgtgctctcaccatgagaagagcttgcctggcaggctactgtccgttcagtctgagtccccgtatgagcacctggagcccaacctcagcaaatagccaaactcagcctggaaccatagcttcaagtgcagatggaatgactatgactacctttcccagtttgcccagcactgtcctggttttaaaactgggagttccacatcccagaaaccccatctgtcctgggaagactggaacagttgggcaccctaagtagaaccactgagctgagcgagatcggtcaacacttaaccaatccgaatggtgagaaatacatgcttattgctgaatgtcactcagatgtttatggcctttggttacacagcaatagctgatgatacaatggctttactaaaacactgttaaaccccatatattcgtgtcacagagaagcacttgtaatgctaaagttcagtatcgtgtttgccatagaaatacaagtacatcatggaatcacagaactgatatgaaaatacagaaattatctgggccaagctactgtctttaggcaggtgattactatatgctacttatattatatattcatttatgtgtatcttgtcattcaaatcagcaacttgaactcatcataatattccataagattctaggctgggtgcggtggctcatgcctgtaatcccaacactttgggaagttgaagggggtggaccacctgaggttaggagttcgagaccagcctgaccaacatggagaaactccgtctctactaaaaatacaaaattagccagacatggtggcacatgcctgtaatcccagctactcaggaggctgaggcaggagaatcacttgaatccaggaggcggaggttgcagtaagcagagattaagccactgcactccagcctgggcaacaagagtgaaactctggctcaaaaaaaaaaaaaaaaaaaaaagatgctaacattgtatctctgtcatgatagatacgaagtaaatggtacagatattgaaaatataatgacatatgggaaatattaattgatttgaatgacatccattctccctggttccacataaagtgcttccatatcatgctttcttagcatctgcctgtcctaatacttatcacaccttcttctatttatgtttgtttctctatggccactattaatctatacattctgggatgccagggcctatgtgtatgttgttccctatattactttgctagggctgccataataaataccacaaactgggtgacttaagcaacaaagatttattttctcactgttctagaggttaaaatccaagctcaaggcaccagcagctttggtttcttctgcggcccctctgcttggctctggttcagcaacctacttcttgctgaattaatgtgaccgcccttctgtctgctcatgtttctggcatctctctgtgtgtctaaatttcttctgctaaggacaccagtcatactggattagagcccaccctaaagatatcattttaatgtaatcacctctttaaagatttaatctccaaatagagttgcattctggggtactgggggttaggacttcaacatataaatttggggggtgttgtacagttcagcccatagcattcccttaacatagtgtctgaatgaatgaataaatgaatgagtgaatatgtttggcatagagttttttctctgggacatttggattgttctaccttttcccccttcatctttctcacaattatcggtgaaatccaaagctcatacttgctgcttgttggaagggttggagtgatgtgccacctgcattcatttatttggtgagagctggtttcattttactctcagtgacagcagagaaagcaaaaggcagcgtaaaaaagagactaacagatacaggaggggaagataaagaggatcatcttgacctggtttgaataatctgatgtattttcaagcgttctatagttgctagactgaccttgggcaggggagaagggataaatcatggccggagagactcactggtgttcattgttttacatactcaagtgcctataatgaggacagtctcattatcagtttacaggaatctttgcttatgaagtttttgtctttcagagagacactcctttgggtatcttaatttcaggcactgagaaagaaatatatgggccaagaagttggactttgagccttagccacctatgcttttgactttgtggataactttaggctaatcagtgtcttcattcatgatataccaaggataaaaagcaaataaggttatagaatactataccagtgaaacttaatttgtatttccccttaacagacatactcaaattgttaatccatgtatcatacatttcttttattttttttttattattttttgagatggagtttcacccttgtcacccaggctggagtgcaatggcatgatctccggtcactacaacctctgcctcctgggttcaagcgattctcatgcctcaggttcccaagtagctgggattacaggcgcccgccaccatgcccagctaatttttgtatttttagtaaagatgaggtttcaccatgttggccaggctggtctcgaactcctgacctcaggtgatccgcccgcctcggcctcccaaagtgctgggattacaggcgtgagccatcgtgcctggcccctttcttttcttttctttccttttctcttctcttctcttcttctttctttctttctttccttctttctttctttctttctttctttctttctttctttctctttttttgttgaggggtacatgtgcaggtttgttttataggtagacttgtgtcatgagggcttgttgtacagattatttcatcacccaggtattaaacctagtaaccattagttatttttcctgatcctgtccctcctcccaccctacaccctctgataggccccagtgtgtgttgttcccctctatgtgtctatgtgttctcatcatttagctcccacttataaatgagaacttctggtatgtagttttctcttcctgcattagtttgctaaggataatggcctccagctctatccatgtctcggcaaaagacatgatctcattcttttttatgtctgcatagtattccatggtgtatatgtacattttctttatccagcctattgatgggcatttgggttgattccatgtctttgctattgtgattagtgctgcagtgaacatacacgtgcatgtgtctttataataggatgatttatattcttttgggtatatacccagtaataggattgctgggtcaaatggtatttctgtctttatgtctctgaggaattgccacactgtcttctacaattttcctgagtgtatcagtcaggatgggctatgttaggctgcagtaacaaacattgccaatattttaccaacttatgtcaacagaggttcctttcttgctcgtgttgcatgttcattttggttcctctatggctattttccatgtcctcttcgctctggaacccaggatgatagagctgctctgtcaccaatgggacaagaaagtatagtcctctggccaggcacagtggctcatacctgtaatcctagcactttgggaggctgaggcaggcagattgcctgagcttgggagttcaagaccagcctgggcaacacggtgaaaccccatctttactaaaatacaaaaaattagccaggtgtggtggcatgcacctgtaatcccagatactcaggaggctgaggcaggagaatcacttgaacctgggaggcgaaggttgcagtgaactgagattgtgccactgtactccagcctgggtgacagagtgagactccatctccaagaaaaaaaaaagaaagtataatcccccctcagggacggatgacagacattttggaacagtaatactatttgctacagttgatgcatatagagtactaattgtgtgggttaagtttaacctagtgttgtaagtatcagctgatgttcttaacgggggtctcagggtgccctgagcaaaccaactgataagttcaccaggagaaaaatcaattatttaccaggaaagcaatgggaagacctagaagaataatggtggaaataaaaagaaatagatggataaaaaagatgtggaggtagaatcagttgaactaacctcttagagttttagaaacttgacaaaatgattctgacgtttattaggaagaataaataggtaagggtgagaattttgtgtaagaaaactaattgagggggacttattctactagatggtaaacatattgtaaagctataatagttacagagaatggcattaagtcaagaatactcaggcagatcaagggacagaacagagagcgcaaaaacagatgacttaaaatagtatgtttaattacaatagagaggccgggcacggtggctcacgcctgtaatctcagcactttgggaggccaaggggggcagatcacctgaggccaggagttcaagaccagcctgaccaatatgatgaaaacctgtctctactaaaaatacaaaaattagccgggcgtagtggcgcatgcctgtaatcccagctacttgggaggctgaggcaggagaattgcttgaacccaggaggcagaggttgcagtgagccaagaccatgccattgcacttcagcctgggccacagagtgaagctccatctcaaaaaaagaaattacaataaaggaagcaccccctaaagagtggaagggaaagcttggttaatacatagttaataaacagtttggggaaaattgactcttagaggaaaaaagcagttaagagtctcatcctaaattccaaataaattttagttgcatcaaggaaatatgtacctaaataaaatagtggataaattaagaaaaaatatatgtgatattatttatgtagttcctggataagaaaattcattctttccaagtgtaaaagcaatagaaaaaaatcctcaaagtaaatagattggccacttaaaaaatttaatttctacatacatgtatatatatataaatctcatagaaaatgaaaaatgaaagatgaactgggaaaaataaatatcttataaaatacatcaatcagtcatatccttaagagaacaaagtacttgtactaataagactaaactcccaaaagaaaaatgagcaaagactatgaatagacaatttattgaagatgaactataattggataataactaattgcaaatggaaagttgaacaaattttcaacctcagcaattataaaagaaatgcaaattaacaccacgagataacatattttaacttattaaaatagtgaagactaaaaatattcgaaggtgggagactgcgtggggaacggcactccttggcattgctatggacatctgagtttgcaaccaccttctagagggagagtttggcactgtagatgagaaacctcattgatctagtaatttgcttttaggaatctgtctggtgggtcgctttcagctatttcctctaaggaaatcatcagagatatgatcgtagacttaggtaaaaggtggttgttatgacagctttatagtgtcaaaaatttgggaacacacaaaacgcctaatacctgggattctcaagaatagatcagtacatggcacaggaaaaaatggtgtttttgaagaaaatatctcccagggagctgcttagcagtgaagggcaaggagggaggaatgctaccctttgaacaggtgtcctgttcaaaaagtgatacagcaaatcctgcaaagtccgcctccttccctcttctgcccccaagttcctgagcctgcactgcccttgcagaggcaaccaatacgtccactttcttttcttgccggagggtttctaagctggactattagcttgacatgtgattttcggagacagaagattcaaggatgttcctaggctgatgagaagagaaaggggactgtctgtggtggtcacaacttttggtctcccatcaccttttccccctccgtaggggtaggacatcaagatgggaaaggagagcaacacctagaaagggaaatagggaagcaactatggggtctgaactgagggcaggaagaaggagggaacagtgttgtttttagacagtaggggaagaggaaaaggtgagataagatgccgagaaagttagcagggaagacgctgatatgagaccatctcgcaaggtagtctccatgacttaagcaacaggctgaccgacctccaagtttccaagtctcctgtaggagacgaggaaaatgtcatgggagacccggaagtgagataaggtaggatgagaaggttgccaggcaacgctgaggtccggatggacgcctgggctcatatttgtggctgcatctttggcacaatatggcggacttctccaccaagaggaaaccataagggttaggagcagaggaagaggagacttgactgactcagggttcggggtgctcaaagggagcggtggccgtgtacctaacaggagtgaggtcagaaggatcgagtcccaggttagggctgctgagaaaagaccagtaggctgactgaccaaacaagatcgaggccaagaactgaacgcctcagtgaagctggggccagggcagcctgggtgaaagtgaaaaaatgggggagtcgaaagagcaggggattccaggtcagactttgagattgcctgagtaaccatgtgttcaacaaccagaaatgaaaggcaagaagctagttgggccgcatctggactttggtggacactaggcatttttgcctttgaaggtctcttcctccataaaaataaaatttaagaatgacattttacaactgcattggtataaaggcaaatctattaatattatgttttcaagcattgtcttcaacgaaagttcagggtttgttcctcgctctgattttaaaagaaagaaaaacatttcttgcactcctacaagtattttgggcctaggcgctgttcctgctgtgcctggtggataagtcagccctgcatgcagcctccaaaatcgggaggtctgtgccaagcacctgggaacctgggtccaaaggaagcccaagtctatcttccatggctccccagcaccctccatgctcagctcttcccaacctttgccttttccctaaaaggcccaaacttcacaccgccctagcttgcccactctgtctttctaaccctttttcctcctcctcctggactttctcgtccggcctgccctgtctttccagcctcaccttttgccacaggtgagtgccaggtacacgggagtgtgcagatggagagggtgtgttcatggaggcttgggcagaagcaccgagacaacagacatgatattccaaaggaggggctgcctccatgggcagaatattccaaagaagtgcctgtcaacttgagtatttgggtcctaaaccccccacacatcaggaatataaaaagggtccagcactgcaagtaagaagagggttctttgggccgggcacggtggctcacgcctgtaatcccagcactttgggaggctgaggcgggcggattgcctgagctcaggagttcgcaaccagcctgggtaacaaggtgaaaccccgtctctacttaaatacacaaaaaattagctggacgtggcggcatgtgcctgtagtcccagctactttgaaggctgaggcaggagaactgcttgaacctgggaggcggaggttgcagtgagccaagatcacaccacagcaccccagcctgggtgacagagtgagactccatctcaaaaaaaaaaaaaaaaaaaggaagagggttctttgggtgtagtttttctgtgagtcccttctgtctcttctacccagtgggagaggagctttattctgacccctcagagagctttgtcttcttaagattggacagagtggtctgttatctggctccttaaaggctgagagaggggctggtaagctgtgttttgggaaaggggagggagaggtgtttgtattggatgttctgtccaccaagagtttgctgggtaaagcatgcttgaatattatctcctggaccagctagtgggccatggcatggcagcagccagtatgaggttgtcttaggtcctgctacagaggccacctgaccaagagggtgaacagcctttagtaaatagaagtgggtggtgccacaggattcccacggccaagaaaggccctggcccaggcatcagcctgccccagggggctgttgggtgagaccctacaaaggtacccatgagagaagggctcagctttaaacatacaaagaccagagaaccggaagccagatggccctcatgatgccagccatgtcccaattttggggctcccattaccttttctccctcccaaaggggttagacatcaagataggaaaggggaacaacacctagaaagggaaagagaaaaaaaatggggcctgaactgggggcagggagaacaatcaactttaaatcaagtttggagttctgatttttatatgaactggacattttaatgatggcattgaaattgggttttaggactcaaaaggcttgaagaaccattctacctcagactgacaagaaaaggtaaaggatctgctccatacttcacctacgggaaggagaattgtccctgcagggtgcacttagaaggacagtgggagacaaagagcaagttgctttctgattgtatatgatgggtcatgcttgttcaatataagagctgctttgggcatatcatcaaaacactctgccctctttctgctgtgtcgttgcttaagctgctccctcagctgggaagagtggcatcccttgccctcttgttgaaattctcctccttcaagatcgagtttaaattctgtgcctctgtaaccttttccccaatccccaatctctagcactttcatgagactgatacataaagtcaaaattctaactgatttaaattgcataaatggtgcaccataggtaaaagttgagtaaaataaaaagaaactccactaccgagagataaacattaagagcaggtgttattgataagccgggtactatttttaagtgctttgcaaataccagcccattggatcccatggcatcaccatagagggggtactactaccatcctattttacatgggaaactacatgtggaaagattaggtaactttaccaaggtctcacagcctacaaattgtggggccaggatttgaacccaggtggtccagcctccataggctgagctcttaaccactacactaggctgcctcccttgctacatatctttggtgccagccgtgtcacaaagtactctggttggatcatgcatgtgataatgagtagtgcattatcttctttaagtcagacatacatagccatatcaagccttttcctatacaaatatatgcatataaacatacatgcaaacaataaatatatagtatataaatatattagtgaaaacaggataggatacactacataatatttttagcctatttttcaacttaaaaataaatcatgaatgtccttctatatcaacaaatatacacggcttttttaatggctatatactcttttattgtaacacactgtaatttatttaattttctggtttgggacattttgatttttcacttttgtgagtataaatattgattgatgctttttggtataaatctttcttcactagtccattatttgcttaacatagtatattagttttatcactgtataacaaactaccacaaacttagtggcttaaaacaagatgttacctcacaatttctgctgatcaggagcccagatccatagggcttatgtggctgcagtcaagttgttgactgggctgtgttctcatctggaggctcaactggggaagaatcttcttccaagtccactcagctgttggaagaattcatttccttatggctgtgggactaagagcttccatttttttttggtctttgctacctgtcagcagttcacacatggcagcttgcttcttcaaggccatcaggagagcaagaatgagtttcctagcaagatggaatctttttttttttgaggtagagttcgctcttgttgcccaggctggagtgcaatggcaagatcttggctcactgcaacctccacctcctgggttcaagtgattctcctgccttaactaggattacaggcatgtgccaccatacctggctaattttttgtatttagtagagacgaggtttcactatgttggtcaggctggtcttgaactcctgacctcaggtgatccacccacctcggcctcccaaagtgctgggattacaggcatgagccaccatgcccggcgcaagatggagtcttataaattggcatcttctatgtagattgctaaaagtagaagcatgggccaaagagtacacaaaattctaggatttttttccatacatattgtcaaattgtactctggaaaaaattgtaccaatttaccctcacacccaacagtgtacgagaatgcctgtctccccaaacccatgccaacactgggtaccagtattatttttagtttgttaatctactaattgaaaacttgtttctcatagttttaactttgggatggccagttttacacatttactggattatgcatgccagggtgagtagtgcattatcttctttaaggcagacatacagaggaagccaatttgttctcagaaggtttcttgttgagcaggaagaagaatggagaggcataccatgttcatggattggaagagtcaacataataaaaatgtcagttctccccaaattgctatacagatttaacacaattcccatcaaaatcccaaggaagggctgggtgtggtggttcacgcctgtaatcccagcactttgggaggctgaggtgggtggatcacgaggtcaggagtttgagactagcctggccaagatggtgaaaccccatctctactaaaaatacaaaaattagctgggtgcggtggtgggcacctgtaaccccagctacctgggaggctgaggcaggagaattgcttgaacctgggaggtggaggttgcagtgagctgagatcatgccactgcactccagcctgggcaacagagcaagactccatctcaaaaaaaaaaaaaaaaatcccgggaagatctatccaatttcaagacttattgtacagctacagtaataaagactgtatagtattgacaaacacatagatcaattgaccaattagacaacccagaaatagatacacacaaacatacctaactgagttttgtcccaagtgcaaaaaaaattcaatggaaaaaagttatctccttgtaaaactggtgctggagctattattcatccatggacaaaaatatgagccttgacctatgtctcacacctttacaaaaattaactcataatgaattgtgtgcttaaatgtaaaacataaaatttttaaactcttaggaaacaggagaaaaatatttaggatctagtgatagacagttctttgacctgacaccaaaaacatgatcataaagtgaaaaactggtaaattgggattcatcaaaatgaaaaaaatttgccctgcaaaataccccttttagaggatgagaagacaaactggagagtgggagaaaatatttgtaaaccacatatgtgacgaagaactcatatctagaatataaaaaagaactctcaaaactcagtagtaaaaatgcaaacaatttgactagaacatgggcaaaagatgtgaagagacattttattgaagaagattaaagatgacaaataagcacatgaaaagatattcaacatcattagcaattaggaaaacacaaaataacaacaatatgttattacaaacctatcagaatggctaaaataaaaaatagtggcaacatcaaatgctgttaaggatgcagagagactggatcaaatatatatttctggtagacgtgtaaaacggcacagttattctgtgggacagtgtggcagttttgtttgttttagatgtgatatagtggaaatagaacattggcttgaggctgggtgccgtggctcacacctgtaatcccagcactttgggaggcccaggggggcggatcacctgaggttgggagttggagaccagcctgaccaacatggagaaaccccgtctctactaaaaatacaaaattagacaggtgcggtggtgcatgcctgtaatcccagctactcaggaggctgaggcaggagaatcacttgaacctggaaggcacaggttgcagtgagccgagatcacgccattgcactccaacctgggtgagaagagtgaaactccgttcctgccccacaaccaaaaaaaaaaaaaaaagaacattggactggaatgtcagttttatcattcaactggctgaacaagtaccaaccttgcagagctttggtttcttcatctgtgaactggtgatgaaaatagtacctacccataattgagaggatttaaatcaggggttggcaaattacagtccttggactaaatctaatctggcacctgttttgcaaataaagatttattggagcatagccataaccacaccacaaggacagagttgaatgtttgtgacagagactggcctacaaagccatttactagatatacctttatagaaaaacttgccaacccctgatctagatgatataatatgcataaaaatgtttgaaaatagtaaagcattaattgtagttgttattatatatctttaataacagaccttctgtttctgagaagaaagaatggttttctcacacaatgccaatctgaacaggtagatttttttttttttttttttttgagacagagtctcactctgatacctaggctggagcgcagttgcacgatcttggctcactgcaaccttcacttcccagattcaagcgattctactgcctcagcctcctgagtagctgggattataggcacgcgccaccacccctggctaatttttgtatttttagtagagacagggtttcaccatgttagtcgggctggtctcgaactcctgacctcgtgatcctcctgcctcggcctcctaaagtgctggtattacatgcatgcaccacagcacccagccatctgagcacgtagatttttaaaaagcttggatgacatatcccctagtaagagtatcatactagcaatattatatctcatgtaagtaatattataaacaatcagtttgatagataacactttttattatgaacagttttgtttgtttgtttgtttttctgagacagagtcttgctctgtcgcccaggctggagtgcagtgatgcgatctcggctcactgcaagctctgcctcctgggttcacgccattctcttgcctcggcctcctgagtagctgggactacaggcacccgccaccgtgcctggctaatttttttgcgtgtttttagtagagacggggtttcaccgtggtgtcgatctcctgacctcatgatccgcccgcctcggcctcccaaagtgctgggattacaggcgtgagccactgtgcccggccaacagttttaaacataaagaaaggtgagctccatatgtctaccagctggatttagcaattgttaacattttgccctatttgctttatgacctattatctctatctctctatctatccacccaccttacctatctgtgtttatatattatttgcccaatcacttgaaagcaaattgcagacatcatgagccttcacccctaaatacttccttagcaaggtgaatgcccaaggggttcaccttgcccgctgcctagagagctgattcatcaagacaggggaattgcaatagagaaagagtaattcatgcagagccagctgtgcagaagacctgagttttattattactcaaatcattctatccaaacattcagggagcagagtttttaaggataacttggtgggtgtggggaagccagtgagccaggagtgctgattggtcagagatgaaatcatagagagtcaaagctgtcttcttgtgctgagtcagttcctgggtgggggccacaagatcagatgagccagtttatgcatctgggtggtgccagctgatgcatcacgtgcagggtctgcaaaatatctcaagccctgatcttaggagcactttagggagggtcagaatcttgtagcctccagctgcatgactcctaaactgcaatttctaatcctgtggctaatgttagtctagtccccaggcaagaaggaggtctgctttgggaaaagggctgttaccatctttgtttaaactagaaactagaaactaagtttctcccaaagttagttcagcctacgcccaggaatgaacaaagacagcttggaggttggaagcaagatggagtcagctatgttagatctcttttaccgtctcagtcgtaattctgcaagggcggtttcgcatgcatcttctgtgaataatgactttctcctgcagaatcacaaaatcgtcatcacatgtaagaaaagttgcaacaattcccaaatatcatctaatattccattttctccaattgttcacaaaatgtatttcttacctcttttttcaaaccaagaaccaaggaagtttatctcattgtgtttggttgttctgtttcttttaatcttattcctccaccttttctccctatgacattgactttttgaagagacaatttcagaccatttaaaccaaataaactatgggctcttggcaggcaaggcgattttttttttccactatgcctctgagcacttaatacagaacaagctgaaaaaatacttcttgacttactgattgtgctatggcaactaggagcgttctgaacaaacggagcaggaagcccttctcatatttgactaatcaattaattaacttttactttatgtgaggcaattaccctaaaacattctggttttgtgccaccagttgtgagaccagagcttaatttctccctgtccaaagtggtggaagaggggcctttgatttggtctccattctgaggacaactcaaagaattttgccctcaaataatgtaaggggtaatgggtaaggtacaaaaggtagaggatggagaatagctcaaagctacaggatggatcaggtgctggtagattctctcaacctgacatcccttcatctgcttttccttttagtgcaataacaaagactgtcccagggaaatgccgtctcatttcttttctttttctttttcaatttttttttttttttttttgagacagagtctcactctaccgccaggctggagtgcagtggcaggatctcagctcactgcaacctcttcttcccaggttcaagcgattctcctgcctcaccctcccgaatagccgggactacaggcacacgccgccacgctcagctaatttttgtatgtttagtagagacggggtttcaccatattggccaagattgtcttgatctcttgacctcgtgatccgcctgcctcagcctcccaaagtgctgggattacaggcgtgaaccactgcacccagctttttctattatattgtttgcatttggtcattgtgttctcctggttgggagttaagcctttggattcttttcttatgttaattcaaacattccagcagacttggaaatggtttcaggagaggacccttgaatatctgagggtctagttaacggtagggaacattccaacattatttattggaaaccatataatacatggaatgaacattgcatattttgaagaaaaccttgaccctcatggttttgagcgtctagaaaaggaggaaattttggctgagagttgaaagcccttgtgtttcctaacagccaatagtaaatctttcctagaagttccggtgtgagctgatttccagccattggggctgatcctaaaatacgttgttaggtgtaacatagaagtcaaaagccacatttctggaaactttggaagcacaagggaatgctctgttgactgaaacaattaaagaggaaatagacaggaagcagagctcagacgctggtgagcctacggctcagtctctcctggtgcatttgtctttccttggagacaactaattggattacacatagcttctagaaagagccaagctgttattattatatttctttttctttctttctttcttttgcgatggaggcttgctctgtcacccaggctggagtgcaatggctcaatctcagctcacagcaacctctgcctcccgggttcaagcgattctcctgcctcagcctcccgagtagctgggattacaggcatctgccaccacacccagctaatttttgtatttttagtagagacagggtatccccatgttggccaggctggtctcgaactcctgactcaggtgatccttccgcctcggcctcctgaagtgctgggattacaggcgtgagccaccgcagccagccattattacatttctttagaaggcctagctgcctgagaattcggaagcactttcatgtattttgtggcaactgtctggtttctatgattgtggtttgggctctctctcgctcacacctcttcttctgcctctctctgtcacctttttcctccttcaggtctctcagcccagcatcaccttctcagagcagcctgcatccatcccctagactagaaatatccccctttcaaataacctcatggcacccacacctcaagacaggttgcaattgaatgtctgtttatccctccctgtctccattctatccccagggcctcccactctgcctggcaaagaacggatgtgctcacatcaggaatattttaatgaaggtgctgttactggaaagggatcccaatccagaccccaagagagggttcttggatctcataaaagaaagaattcagggcgagtccataaagtgaaagcaagtccataaaggaaaagcaaagagaaaaaagaatggctactccatagacagagcagcaccaagggttgctggctggccatttttatggttattttgttattatgtgctaaacaaggggtgggttatttatgagttttctgggaaaggagcaggcaattcctggaacggagggttcctctccttttagactatatagggtaacttcctgatgttgctgtggcatttgtaaactgtcacgatgctggtaggagtgtcttttagcatgctaatgcgttataattaccatataatgagcagtgaggatgagcagaggtcactttcatcaccatcttagttttggtgggtttctttaccacatcctgttttatcagcagggtctttgtgatctgtatctgtggtgccagtcctgctgacctcctttctcgtcctgtgactagtgatgtctaagctcctgggaatgcagccctgtaggtctcagccttattttacccagcccctattcaagatgcagttgctctggttggaacgtctctgacagtatgagtttgggaagagttggaaatgctgaagaagtgacctggagacagcgaaggtgacgtagggtttattggggggacttacatacagggacggtccagtggcggcaggctggccaggagaagcactaccattgtaaaaagcatgtagttgatgtacgattttcacttagcaccctccatctagcaacctccatacataagtaggctaagaatatggacagagaattgacaaaacaaacataaaccatgaaaaatatgaaacacaccttttgaaagatcaacctaaattggattcaaagaaatgcaaattaaaatattttgtcatcaaatcagcaaagaagaaaataatatgcaatgctgttgcagtgaacgagattctagtggaagtatgttttttggcataaatatattcaacacataaacataaatattaatgtatataaataatatgtaaacatattataaacatatacacaataattaattatatatacatataaatgtataaatcaataaatgtcagagcagtgatgaagacaataataattatggtaataatcccaatcataaatgtgaacatttgttgagggcttactcacactacttgtgacatttcatatatattatctcacttaatcctgacaacaacccccattgtctgaagtacatacccaagccttatcgcctcataccaaggatattgaggatgcagaccagcaaggagtgaatttaagagcagaagtttaataggcaaaagaaagaggaaagctccctcgtgcagaggaaggggtcctgaacgggtttctgggttcccagcaagatgccattggttttatagatgagcttgaggaggtggtatctgatgtacgtaggatgcaaaagattggttggaccaattccatttacatagcatgcaaagaagccggctgtcccatcctaatctgtttttatacagatgtgttctctacctggccagcgtcatgttgcctgtttgcttactgcacgcatggtgacaaaacagaagcctccatgttggatatgcctgggtcctaggtgtcaggcctctgagcccaagctaagccatcatatcccctgtgacctgcacgtatacatccagatggcctgaagcaactgaagatccacaaaagaagggaaaatagccttaactgatgacattccaccgttgtgatttgtttctgccccaccctaactgatcagcgtactttgtaatctcccccacccttaagaaggttctttataattctccccacccttgagaatgtactttgtgagatccaccccctgcctgcaaaacattgctcctaactccaccacctatccccaaacctctaagaactagtgataatccaccaccctttgctgactctcttttcggactcagtctgcctgcacccaggtgaaataaacagccttgttgctcacacaaagcctgtttggtggtctcttcacatggacgcgtgagacactaggtagcccttttctgttagcacagctgctggcattcacctgcgcaagcttccagcttgcttatctatgtctgcagcttgatttttcaggctgccctttgttagaaaagaaatgatttgggggctgctttttattaaaaaggaagccttgccaaggactctcttacccttactaactgcctaaagaatttctttctagctcctgtatcagatggactataatcatccccatcttatagtggaagagagagaggcagagagcagttaagtagctgtgccgaaccccgatggactccagtagggatgacattgtgtctgagagctgaagaagtgacctggagacagcaaaggagacgtagggtttattggggggacttacatacagggacagtccagtggcggcaggctggccaggagaaccactaccatttgtgaaaagcatgtaattgatatagcattttcacttagcacccttcacctagcaacctccatttaacccaaacaaagagccttgaccccttgtacagcttgcattccaaaggatggctgggggtttgggtgtccttcttagataagggtttggccactcctggattccttcacttaagactctgaactcacattcttcttagaccacaaggttatcaaggttatcctcagatgatgcttaagcgattgctgtcaggtgcatctgccacacagtagtttgccaaagatcacccagtagcaacggaattgggatttgaaccaggcagtcctctgaagtctatgctttaccgtcttacctaaaaaatgtttatgccccttggccttctgatttcacttctgggagtctagctcaaggaagtatttctaaagattatcaggcacaaatatgttcgcagaaccattatgcaagacatctattccatagatgattctgttgtccttaaaaaggtgtttatagctgggtgtggtggctcctatttgtaatcccagcactttaggaggccaaggtgggaggatcccttgaggccaggaattcaagatcagcctgggcaacatagcaagaccgccatctccacaaaatattttttaaaaaattagcagggtgtggtgacttgtgccagctactcaggagacttaggcaggaggactgctggagttcaggagttcaaaactgcagtgagctatgattgcaccactgaacttgatcctgggcaacagagtgggaccctgtctttaaaaatatatatttatgatgaatacaaaacaacataaaaatattttcatgaaattttatgtggtaacaaactcagacttataccatataggatgtcaaactgcacactagccacactaatcataaaactgaatctataagatataatattttttgttttggagatgggagtctcactctgtcacccgggctggagtgcagtggtgcgatcttggctcactgcaacctccaccttctaggttcaagcgattctcctgcctcagcctcctgagtagctgggattacaggcatgcaccaccactcctggctaatttttgtattcttagtagaaacggggtttcaccatgttggtcaggctggtcttgaactcctgacctcatgatccacccacctcggcctcccaaagtgctgggattacaggtgtgacccaccgcgcccagccccataagatataatattaagtcataagagctagatacaaaattaaatgcaccacatgattgcataggtaaaagaatccaacacaactatgcctcaaagaaagactgaaagaaaatccaccaaaatattagcagtgatcgggcttgggtggcgaaacaatggacaattttcatttcttttttgtacttactctgattttccattttttttttcattcacaaacaccatggcttttataattaaaaacattgtttaacataaagggaaacaaagtttgtgtgtggggtaggttgacggggtagcagaaagggaaaattcggcctggaggaaactgatggatagatatttctcactgtgtggaaatccaaagaggctgagaagtgggtcttactgaaaatattgcttccagagcatttggggactgtgccacctgcaaaggccttggtgtcttgagcacttcactttgtaactgatggctcattgcaatgtcctgcggtactgactcgggagaagtaccctgtagctgtcttgcaattcccaccccccgccatcatttctttgggaggcatctggagtgactcattgtccttgtcctaaaatatgaccctgcctctgggatcctgaaagcaggcactctgagtgcctgtgtcccctcaccgctgtcacactgtagcacgcgttccgcgccacttgtctcctcagtcccctcctccctcgcagaatttctctcggaaaccttactctctaatcactgatactgttgactggagccccagctccaccgtctccccttctgtgaagtgtcctgagtcaccccttcctttgcgctctcttagtccttcaccccctttatactctactcatggcatgctgaagtgggacacaccccactgttcatgcctgccccagccatgtcctcttcctgtttgttttgtagagcagacactccataaatactcatagcagaaatgaataaatggatgagtcttgttatcacgttgacggtgacaattttccgattgttcagaggctccagaattggatgtctttctgatattggaagatctacttaggaggtatagctatgaaggcttagctctgtattagaaaaattattcaccagatacttgctaaaaatggcaaggaaaactttattcaagactattgcgataggggtcaagactgctgaagaaggcagagaggttgagctccactctgcacacagcagggacagcaaggcatttatagcgggagtgagggagtgagtagatgcaacattactcaggggagcttgattcaacagccggggtagggggattcttgataaactggcttcataggattctcactaaaggcagaccaaggacatagatagcaggggtggggaaagaagaacttgatcagatatcaagggtgggaggattcttgataaactgagcaggattcttttgctaaaactggcttgggcaggccaagggctaggggaggcccacatcaaggcccagctgagaagaggactcaaaggaacctgactaaagtttggtggaggagggagtctctgttagatccatggaagaggtatgcagttttcactgtcatgtgccactgtttgcacagcgtttgactgcaaaacccatggtgcaggcatcctgtctctaagtgcgatttttagacaaggaagatgtatcagttatttatggccacagtaatgctgtgtaacaaatagccacaaacccccatggcttagaacaacacgtgtatctagctcacgggtgtgcaggtctgtgagggcttctgctgggcttggttatatgcctgggggttggccaactctgggctgatctaagagggcactgctgggaagcttgagacagctccgcctgctttatgtatttttcctcctgcagcaggtcagtctgggcatgttcttgtggccaggaggtcaagaggcatgcagaaatgccaagggcttctctgagcctctgcatgtgttaagtctgctgaaatctcattagccaaagcaggccgcacagatgagcccagaggctgagtgggaaggccctggagggttccatggacctgaatcggggccattaatgcattaagctatcagagaagagggaaagtcatacgcacactcacagcactgacttgggactcctgcctcagtggcatccaacactctggttgcattcatggagctatcttagcctgatttcttttctttggtcatttcttttcttttcctttctttctttcttttttaaattttttaagagatagggtctcactctgtcatccaggctagagcacagtggcgtgatcacagctcactgcagctttaacctcccaggctcaagcgatcctcctgcttcagcctcccaagtagctgagactacaggcatgtaccaccacacccagctaattttgaaacttttataggccaggcatggtggctcacgcctgtcatcccagcattttgggaggctgaggtgggcagatcacctgaggtcaggagtttgagaccagcctggccaacatggagaaacccccatctctactgaaagtgcaaaaattagccagctgtggtggcgggcacctgtaatcccagctattcaggaggctgatgtaggagaatcacttgaacccgggaggcagaggttgcagtgagctgagatcgtgccactgcactccagcctgggtgacaagagcaaggttccatctcaaaaaaaaaaaaaaaatactttttatagagacagggtctcactgtgttgtccaggttggtctcaaactcctggcttcaagtgatctttccagcctcagcctctaaaagtgctggagttacaggtgggagccaccactactggccctctcttttgtttgtggagctacaatattttcccctggacatgcaaaaaggatccgagaccgtttcagaaggctggtattttggaagttaaccctgtgaaataggggtgtctcctgtgtcccctcctcatgcaactcacaatatgacagtggagagggatatatattcagaaaattgtactataacatggcacatattatagacatggtatatagaagattatttttataatacacaggatatggtatttaggtgatcttaactgacaagtggttatttccaggacaaatcagggtatcatttcaactttctttcaaagccaccgttagtaacttttaacaggtgaataaatagcaaacttttgttttgttttgtttgtttttgagacagagtctcactctgttgaccgggctggagtgcagtggcatgatcttggctgactgcaacctcccgctccctggtttaagtgattctcctgcctcagcctcccgagtagctgggattataggcacccgccactacgcccagctaattttttatagttctaggagagatggggtttcgccatgttggtcaggctggtctcgaactcctgaccttgtgattcacctacctcggcctcccaaagtgctgggattacaggtgtgagccactgcgcttggtcacaaacttttttttttttcaccaattttaataggtgaataaatagcaaacccctatggtaggacatgtgagttaatgcattcattgtagaattgtaaatgctctgtctttggagggtatatgccaagtttgcattcccctaatgcagatgctgagacaagcacttgggggcgggtagttcatcttagaggtgattccaggaagtacaggcgaatggggactgtggcctggggaagggagaaagctccaactgagtgcattaagcagctggttaccagtgggcaactgagattcaatcccaggggtcctctgaagaactgtgcagaccgggcctcggaattgccccacggagtggcaggcaagctggcctagctgtctgctgactgtcatttcttactggttgatggtttgccttggaggcattaaatgcctagtcctacaggctgccctggagagaggctgagcagcctccagagaaggccctgagtgggtgagaagcagagaggcaggcattggagaagcgctgtcagcatgcacagttagtgctcagcgcagctgcagtcaacccaggtgagccaggggacagtggtggggcctcaaggtactgagaccccgcaccggagagcacctgtctcagtgctgagcaatcctccaggcttttttttgattgaggagtttggtttgggtacatgtattcttttttttttgagacggaatctcgctctgtcacccaggctggagtgtagtggcacaatcttggctcactgcaaactccgcctcccaggttcaagcaattctctgcctcagcctcctgagtagctgggattacaggcacccaccaccacgtgcggctcatttttgtatttttagtagagatgaggtttcaccatcttggccaggctggtcttgaactgacctcatgatccacccgcctcggcctcccaaagtgctaggattacaagtgtgagccaccgcacctgcccactggtgcatggatcttaagaaatgtctgggctaggaccgggcacggtggctcacacctgtaattccagcactttcggacgccgaggtgggtggatcacgaggtcaggagttcgagaccagcctggccaaccccatctatactaaaaatacacacacacacacacacaaattagccaggtatggtggtgggtacctgtaatcccagctactcgggaggctgaggcaggagaatcgcttgaacttgggaggtggaggttgcagtgagccgagatcacaccattgcactccagcctgggcaacaagagcgaaactctgtctcaaaaaaaaaaaaaaaaaagaaatgtctgggctataacaagtgtggccatgccccacagacagaaacgtgaggtgtagggtgttcgttacctatgcgtgagtgtggatgcagttttttttttttacaagatatacttggctctgtcgatggaagctttcttctctcactgctgagtgatggtgcagaggtttcctatgcaggcacctgtccttgtcgcaactctcaaggttgacatacaatgttggctcaggcatgtggttccatttataactgccagtgtggagtggcacatcggtactcatcaggagatgcgatctttggctcgttgctgccgcgtatctactgggaacctggctgaaaacagcccttatggaggggtgacatgaaggacaagtggtctccccactcttctagacctggggttggcttttcttttcttttcttttttttttttttttcctttttgagacagagtctcactctgtcacccaggctggagtgcaatggcgcgatcctggctcaccacaacctccgcctcccgggttcaagcgattctcccgtctcagcctcctgagtagctgggattatgggcgcatgcctccacgcctgactaattttgtatttttagtagagacagggtttcaccatgttgaccaggctggtctcgaactcccgacctcaggtgattcgcctgcctcagcctcccaaagtgctgggattacaggcataagccaccgcacccctgccagtgtgctttttctataaagggccagatggtaatgactttaggctttgtgggccagagactctctgctgcaactacttagcaaggcttctgtagctccaacacagccacagacagcacattaaggagtgggtgtggttgtgtgttgataaaactttaattacagaaacagtttgtgagctggattcagcttgtgggccatagtttgttgatctcagagtgctccggacagtatagcctagtgctggatagcagtgacagctgtcctgggactgtggcatgtcaccctttagaattaattcagtcacatgacctagcataggggattgcgattaacctgtaattaattgcctttactgggttgcggggagtaggatgcattgaaccatgatattgttgctggggaagctgccccatccaagtcccctttcagatggcctggagggtgtctgccctcacattccatgccattctcttttgattttttccccgagatggaatttcgctcttgttatccaggctggagtgcagtggcaccatctcagctcactgcaacctccgcccccaggttcaagagttcaagtgattctcctgcctcagcctcccaagtagctgggattacaggtgactgccaccatgtccagcaaatttttgtatttttagtggagacggggttttgccatgttggccaggttggtcttgaactcctgacctcaggtgatcctcctgcctcggcctcccaaagtgctggggttacaggcatgagccaccgtgcccggcccagaaccctgttctttagtacatcacttctcatcatctggtgctgaacagttggcctctgactctagcatacaggcccatcccttaattccccagagcactgtgaagagcaggcggtgatttgtaaaaaaaaaaaacaacacggctgagatctgagggtggcagaagggactgcagtgtagcaagaacaaagcagcttgaagagatttttcaagagctgcagatgtggggtccatcaacgaaggcccatgggccaaagccagccagctgaacggccctgccagctaaaaatgatttttgcatttttagatggttggggagaaaacatcaaaagaagaataacattttataacatctgaaaattatatgcaatccagtgtccatgaataaagttttattggcacacattcgattagcatctgtctctaccccagacagaatgctccattccccaaagcatttgaaggcagttagagggaaacataacacagcacggggagaatgcaggtgcctgtttttgctcagagtcccggcactttctttctttctttttcttttttttagggggaggacggaatctctcgctcttgtcgcccagcctggagtgcactggcgcgatctcggctcactgcaagctccgcctcccgggttcacgccattctcctgcctcagcctcctgagtagctgggactacaggcgcccgccaacacgcccggctaatttttattttgtatttttagcagagacggggtttcactgcgttagccaggatggtctcgatctcctgacctcgtcatctgcccatcttggcctcccaaagtgctgggattacaggcgtgagccaccgcgcccggcctctttttttttttttttaaagacagtatcgctctgtcgcccaggctggagtgcagtggaacggtcttggctcactgcaacctctgcctcccaggttcaagtgattctcctgcctcagcctccccagtaggtgggactacaggcgtgcaccaccgcacccggctaatttttgtatttttagtagagacggagtttcaccgtgttggctaagatgttctcgaattcccaacctcaggtgatccacgcacctcggcctcctaaagtgctgggattataggtgtgagccaccgtgcccggcctgtttttgcgcagtttcctagcacttcgcccaggacctggtacctggaagaccttcaaatgtgtatgtgaactgaccgaatgaagagtttggatgagaaggggaaggaagttgaaggcacggagacaaagggactgagggctgagaaggagaagctggtaggagaagctggagaggcagtgtgcacagtagttagagctggggtgggtgtgactggtggggtttgggttttgggctctgccactgattagctgtgtgaccctgggctaattacttcacctctctgggcttcagttgtaaatcagggaccatactagtacctactcatggggtgctgtgtgagacctcaatgagtgaatgcgtataaagcacttaggatagagcctggcccgagtcaatgcttgtgggttgaattgcgtgctcctgcaagttacagtcgagccctaacccctggtacctgcaaatgtgaccttacttggaaataggctctttgcagatgtgattgagttaagatggggttgtatgggtttggtgggggccctgatccaatgactttgtctttataaaaagaaggaaatttggacacacagaaaagaaggccatgtgacaaccgaggcagacaccgaagtgatgtgctggcagggatggggagagatcctcccctcgagccttcagaggcagccctgccctgctcacacctggatttggacttctaggctctgttgttttaaatttgcagtttgtggtcatttgtgacagcagccacaggaaataactaccggggtccacaaaccctagtgccacggctgttccaggtgacgctggactgggggaacagggtgatgggggctgcaggtacactgctgcctgtgttctcttcggcacccatgtccatgtgtggaaggcagagagctccctttgcagccgcccattgtgtgcacgtggcaggccagagagctgatgccccagccgcagcctccaccaacaacgataaatacatctgtgtcctcagccgtggttgggctaactccggggtgtgaattaggtggggccgagctccagttgccccctcagtggtatttgcctgcacacacacccttagtgacttccttcccctccctgcaacctggctggtgcttcctggggtcacctccccaataaacacctgcactcactctctcatctcggtgtctgcttctggggcagcctagacggacacagagagcttgtggatggtggatgaacaaggcctgtctgagggagcaaggtatcagggaacctgagcctgagggaggtgcgggagctggagcatgggtctggaggaggaaaaagcactcttggagtagagaaaataagggaggcagaggggatttaaccaatgagaaacccaagaaaagaacctccagggcaagaagtccaatagggctgatttcttttctttgcactctttaaacaatcattatcatagtaaaatatgcgcatagttaaaaaaaaaaaaaaaaccaaactgcctagaatagtggtctagtgaaggcacagctcctcgcgctacctctcgcctccagctcctgcctgctccctgaaggtaaaacctcctttgagcagttttaggctttggctctggaggttgcccccatgcctctgaatgacagctgctgtggttatttggagtttatcagcctcagatattgtctgttgacctgctgcgatgaaggatggagtagtagacggaattataaaatggcccagagtctggcccctggtgcacagctacctccccgctcccgtgcacttctcaaacacggttctgggtgcagctgataacagcccagatcactggactttaagatagggagtgggcctgagtgggcctgacctaatcacaggagtgctttacacctgcggctggagggcagccatggagaaggtcaaagattcaaagcacaagggggatctgaagtgtgagaggtgccctgttgctggcttgaagatagaggggccacatggcaaggagctgtgggtggcctctggggactgagggtggcccccagctgacaaccaccaaggaaacaaggactgaggtcctacagccccaaggaaccgaattctgactcagccatgtgaccatggaagaggactccatgcttcagaccacagagcagcttcaatttctgccttgtgaggccctaagcacagaacccagccatactatacctagtcttctgatgatttttgttgttgttgttgagacagggtcttgctctgttgctaaggctggagtacagtggcgtaatcatagctcactgcagctttgaattcccaggctcaagtaattctcctgcctcagcctcccgagtggctgggatcataggtgtgcgtcaccacatctggctaaattttattttttttttttagagatgggatctcactatgtttcccaggctggtctcctggcctcaaacgatcctcctgcctcagcctcccaaagtgctgagattccaggcgtgcaccactgccctggcctatggtggttctttatgcagaacaggtagctagcacagtggtgtcagatggtgtaaggattgagctgtcacaccattgttcatcaccccgccgtgcctgggccagcctggccgtattgctactttaacctcctctgcaacttccaactgtgccttgccacgtccctttccaattccagccgtgacaggcagtctcttggctccccatgttataagttgtggacatcttcagtgttgcaggccatatggtctctgtcagaacaaaactctgcccttccagacagcatccataggcagtatgtaaacacatgagcatggctgtgcgccaataaaactttatttacaagaaagaaatacgggcccacccacccttcgggctccttctccacctcttgtcctctgtccagggaaccattactgtcaccagatccaggttgctacccttgggaatctcttggcctcatccttaggattctatttccaatgtatgaaaagcagatttctgattaatgtgtagtaataggaagcgctggaactatccaggcttatctctccttgccagtgacttttaaaacggttgcttctatccaattctgtcggagagaggcagaggccccatgggacatgaagatggagacccagctcctgctggcccatagtataggattccttgtctgggactgtgtgtttgaaacatcctttatatacaaactccagcctccttcagcccgtgcattgcaagccaggggtcacagctggaagcattttcatgggaaattcagagttgtcaaaggcatttatctggtattttattgtaattggttaatttatgctttatttaccttgcggataggatctgagagctaaggctgggtactgctgcctttttctgttccacactgtcagggaaatgtatgtctccttaggcttaaaagcatttttttttttaaatgagaaatggagctttggaataaatatttttcattgctcacgacacggagcccctgggtcaccatggcctgtgttcttttaagtcatgtaaaactagtttctgctgagaacattcaaatgtttcaccttgtgctgaggaatttggaactaatcttctcagatcggtgttgctggaagtcggtccaggagctttttggataatccacctcatgactggaaaacaacgaagaaacccagtagcttcttcgccgtgtggattcagacccgggagctcaggcctgcacctgggcagctgctccctgcacgtggccggacatatggaatatggagccccgctgccttggagtcagagagctgccaagtagaatttgcatgtaatgctgctatcattttcaattgctctcccaataaaacaggccctggagccgaggtgaatgccgtagaaggcattttttccactgggtgtgggtccagaataaataatcaaaagaaaatccgctcatccaagcggcttcttggagatacgttttaattcagactggttggaagccactgatagatgcagactagagcaaagaggaccaaagccagcatcagcaggctgcctcacgtgctccaccaagaaatgtcgctcccaagtgtgtcatatgtgacccagtggtagagtgcagtgtctctctttctcctctcacctctctcctcctctctgcctttgcacccctcttgcctctttggctctgtccatcctcttcttgccctccctctctgccttcctcctcttcctgacctcctcctctttcaaccataagtcctttacctaaaaacaaaacaacacaaaacaaaaaacctttttaatcttgcaataagtatctacatttttatttttttatttttttgagatagagtcttgctcttgtcgcccaggctggagtgcagtggcacgatctcagctcactgtaacctccatctcctgggttcaagtgattctctttcctcagcctcctgaatagcgggtattacaggtgcctgccaccatgcctggctaatttttgtatttttagtatagacggagtttcaccatgttggccaggctggtcttgaactcctgacctcaggtaatttgcccatcttggcctcccaaagttctgggattacaggtgtgagccaccacacctggcctgcaataagtatagactctacaaaagttgcaaaaaatctgtagtggagctggtccccgtgtactctgcacccagcttgccccatagttgcatctcacataacaatagcgccatgtcacaaccaggaaatcagcacagacacaggtatgtcaacaatagcgccatgtcacaaccaggaaatcagcacagacacaggtatgtcaacaatagcgccatgtcacaaccaggaaatcagcacagacacaggtatgtcaacaatagcgccatgtcacaaccaggaaatcagcacagacacaggtatgtcaacaatagcgccatgtcacaaccaggaaatcagcacagacacaggtatgtcaacaatagcgccatgtcacaaccaggaaatcagcacagacacaggtatgtcaacaatagcgccatgtcacaaccaggaaatcagcacagacacaggtatgcctctgtcgtcaagcccttcagcttctagtgctcactctttcatgtaagcttattccattttcaggcttcttaacttgctcaaagaacatgtatctaatatgtattttcttccagatagaggcgccctcttttctccatttgctcatttttgagtcatgtgacagggccccgggtcctcccgccagacacacctatgggagaaaaggggagtttgaagaatggggtcctgaccttgctaggcaccatttgaagtgctcacatgtcctttgtcttattcagtctccatttgttttcatttatgagtgaaaggagatgaaattgagatggacttgccttgctcttggtgcagagctgtgattacagagttgatgagaaagctgttccaactgtgcatggagatgcattccgtggtcaatctgcacatggctgtcaggtgggcagccttctgtgacgtgggtcattgcaggctggctgagcttcagggagccttggttcctgcaggggccaggggagccctctcttcagtctcttggcctggtcacctggccggggctggtaccagcatggaatttgctggtaagctgggaagtagatggactccatgttttcctgtccggctgagaagttggatctgtgggtgctctgatgacttcacttcagtgaatgtgcagcttctcgcccttttcacctctaacggtggctttgcatggagcatgggacagttggttaggagaccatggtctggggacccaggcctgatatgacaggggcactcagacaggggcttgggctgatctgggctctctttgcacttgtctctactttcttccccaggaactagctggagtcagcaggagagagagcaatgccttgttcatccatccaggtggggctccgagagcttccaaaccaatggataagaaggaggagccacagaggctagaaaagactgccgaccacagtttgtcccatgtagaactttctggaacattcagctgcagaaagtgaatgggctcaaagctttctgtctccttctgaacaggctgtctataaaaacaaaggaagcctggctgcctgggagacagttcttgatggtttcaagacaagctgcagtgtctctcttggctgcaggatgggatggttgccatgagtgaggagcacagttcacctaaggctgcccttgtcaggagcggggaaaggtgaggatgaaaaatctcttatgagagcccaaatccacgtgtgtgcatagctcatggagagcataacatctcaatcaaattgtttgccgacaacatttatttcagctaaatgatacttcagagaggccatccttcttcatattctctgaatcaatccattaacacagcataaggcatccaggaaataatggctgcaaacaagcctgggagccagaaagaacggctttggtgggtgtactggtgtggagggagccaagaccagtaagaagcctaaggtcacagagtctgcaccaggatctcggtggtgggagtaacagagaagagctgggtctaaaagatgtcaaggaatgaaagtccatgggatttaagcatgtgacctcacatgagttacttaactgctctttttttttcccatttgtaaagtgggatgtgggaggcagaataatgtccccccacataggtccatgtccttatccacagaaactgtgaatacgttaggttacccagtaaagtgttggataaaggaattaaacacttagggaaaataagaatatagatgatctcattaataatttgttatattgattaagattgcttaacagcaatcttaccatgttgagatggtaagactggatatatcaggttaaatgacacctattcattgaattaatttcacctctttttactttttaaaatatggctactggaattaaaaggttgttaatcaggtaattttaaggtgaggggttatcttgtattatcctagtgggcctgatgtaatgacaagggtccttaaaaaatagaaggagccagaagaggagattggagagatgggatgagggaaggaatcaactgctgtagctggctttgaagaaaaaagacgccatgagccaaagaatacaggcagcctctaggctggaaaaggcaagaaaatgattttctcctagaggcaccagaagggagtgtagactgctaacaccttaattttagcccagtgaggcccacatcagacttctaatctacagaactacagtgataatacgtttatgttgttttaagtccctgagcttgtggtaatttgttaacagcagcaaaaggaacctaatacacgaagggcaataatagtgccttcctcttgaggtggctgtgagctttacatgaattatgacatggcagcacttagaacagtagatggctctgccaggtatggtggctcatgcctgtaatctcagcactttgggaggctgaggctggtggaccacaaggtcaggagatcaaaaccatcctggcaaacacgatgaaaccccgtctctactaaaaatacaaaaaattagccaggcatggtggcaggcgcctgtagtcccagctacttgggaggctgagacaggagaatggtgtgaacatgggaggtggagcttgcagtgagttgagatcgcgccactgcactccagcctgggtgtcaaagcgagaccccatctaaaaataaataaataaataaataataaaataaaaaaaataacagtagatggctcaatataacatcagcactggtgatgatgatgatgacaatgatgatgatggtaagggtgatgatgatgatggatattatggtgatgatggtgatgatggtgatgatgatggatatggtgatggtgatgatggtgatggtgatgatggtgatggtggatatggtgatggatgatggtgatggtggtgatgatggtgatggtgatgatggtgatgtgatgatggtgatggtgatgatgatggtgatggtgatgatgatggtgatgatgatggtgatggtgatgatggtgatgatgtgatgatggtgatggtgatgatgatggtgatgatggtgatgatgatggtgtgatgatgatggtgatggtgatggtggtgatgatgatagtgatggtgatggtgatcatgatgatgatggtgatggtgatgatggtgatggtgatcatgatgatgatggtgatggtgatgatggtgatgatgatggtgatggtgtgatgatggtgatggtgatggtgtgatgacggtgatggtgatcatgatggtagtgatgattgtgatgatggtgatggtgatgatggtgtgatgatggtgatggtgatggtcatgatgatggtgatggtgatggtgtgatgatggtgatggtgtggtgatgatggtgatggtgatcatgatggtagtgatgatgatgatggtgatggtgatggtgatggtaatggtgatgatggtgatggtgtgatgatgttgatggtgatggtatgatgatggtgatggtgatcatgatggtagtgatgattgtgatgatgatggtgatggtggtgatggtgatggtgtgatgatggtgatggtgtgatgatgatggtgatggtgatcatgatggtagtgatgattgtgatggtgatgatggtgatggtgatggtgatgatggtaatggtgtgatgatgatggtgatggtggtggtgatgaatgtgatggtgatgatggtgatggtgatggtggtgtgatgatggtgatgatgtgatgatgatggtgatggtggtcatgatggtagtgatgatggtgatggtgatgatgatggtggtgatggtgttggtgatgatggtggtgatggtgatggtgatgatgatggtggtggtgatggtgatgataatgatggtgatggtgatcatgatggtgatgatgatggtgatggtgatgatggtgatggtgatgatagtgatggagaagatcattactattatcattgatatacttaccttgagggatgcccacgttttaagagtgttaagaggaaaggggagtcagggaaggcagcaggaagaggggtgaacacgaaaacccaagggatgcagggttgcaggatcatgggaggtgagagtggacagaagtggcgatggcccagggtcaagttgtgtggggaagtcaagtggggaaggcatgacaagcagagaccagaagggcctcactaagcttggcatgggagagagagagcactggactgggagtctggcacttaagcactagaggtgagctgtctagcctggcagccaccagccacacatggctatggagcacttgagatggggccagtgtgaatctagatgtgctagaagtgtaaaatactcactgggtttcaaaacttagaggaaaacaaggtgtttttctctaaaatgatctcggtgacaatttgttatgatggttacatgctgagatggtaagatttgggatatatcaggttaaatgaaacctatttcttaaattaatctcacctctctttactttttgaaatgtgactacttgaaaatttaacatggcatccatagctcacattctcttgctactggacagcactatgccaggcctgactgtgccactaaatataggcgcgaccttggccaagtcctttgtgcattctgggttgctgtctcctttgtttgtaaagccaggtgctcttcaaggtctgtgcagggcattctgggtgtggtatctaggtcatggggaacacagagagaacacggaactgtcccagcgggaaggcatatttaaggaccagggccagtagaggcataagaaagccaaggtgaggactgcttgctgcagagggttgacaatgctggtgaaaaaagggaaggggctaaaaatcattatacattctcctgcagagacttgggcagtttgtaatccaaagagagggaactaacgtggagagagagattagatcgacgagcgagagggtgaattgatggaagagagtgccgcgagagtggcaggaaggagatttaaggtcagggcaggaattaaccttggaggaccaggagagaatgaacaggtgagaaataaattaaacaattagcacactcatcaaaacggtgtctcaaagcacaaatgaaggggaatcgggtgcctccgaggacagcacagctaacaggtgtttaggaagtcaggaggggagagaggacttgctgcagaaggggaaattggagctggctgaggaaaatgagtgtgtttgcacagaacacgtcacagaggagtggggaggcatgggctcactgggatgggcaggatgtaggccaagtgaggccacgataggaaagtccccaaagcccagataaaagcaattgcagcccaaatgccaaagaatagaaaatcaaaggcaaaaataaatgtgttgtgctctttgaccctaaccaacctctttttccagtttgagttgggggctggaaagtcaggccaaggaggtgctttgctgctccatgctgagggcaatggctagtcacagacccagacattggtgggtatttcatttcagcacctctactcacttgctgtgtggccttggggagatgacctaacccctgtgagcccaagtttccttagggggtgttttgggcttaattatgtcaccccgcaattcatatgttcaagccctaagtcacagtaatgtgactgtatctggagtcagggtctttgaagaggtgatttagttaaaatgaggccattagggtgggccctcatccagcatgacgtgggtcctcataagaagaggagattagaggccgggcgcggtggctgacgcctgtaatcccagcactttgggaggctgaggtgggtggaccacgaggtcaggagttcgagaccagcctggccaacagagtgaaaccccgtctctactaaaaatacaaaaattagctgggcatggtggcgcacgcctgtagtcccagttactcgggaggctgaggcaggtgaatggcatgaactcaggaggcggaggttgtggagagctgagatcgcaccactgcactccagcctgggcaacaaagcaaaactccgtctcaaaagaaaaaaagaagaagaagagattagttatgacacagacacacagagggaagattgtgtgtctacaaaccaaggagggagatctcaggaggaaccagccttgcggacatcttgatgttgggcttgtagcttccacaacagtgaggaggtcatttctgtagttgaagctgttcagtctggtgcttggctatgggagcaaactaatgtaggaagatggcaggaccctttacgaggtattgtgaagactcaataatggtatgtaagtgtctcagcacacagctgagagccagggagagtcgtttccattcatagtggcttggaagcttctgtaagtgagtgagagagggaaaacccaggtcttcatggtgtccccctctggggacagtgcccacttctcttcaggctggtgaacgtcctgctgatgtggacaccgccaagtggagtgtgggtcactggagtgaggtcctgcacacacaacggcctcggagacacacacaattggaccaagcattcaggaacaccagcttggcgcgctcccggcaccggagggacgctgcccctagtgacggtcgctccggctgtgacggcttccctccagatgccctcactggaatcccaggatgtcctggggggaattaaattaaatcctgccaaggacctcaggggcagctgttggacagagctctcccctcttctcgactctccaccctgacgagataaacgggcggtttctttcctacctttctccgtggatcagttcactttagaccagactttgtgtctgtaacatcaacactgttgctgatagagactgtcctcagaggaggtgtggttccagcatgtctacgtacccatccagaaagggcgaatattctctgaattcccctaaatcttttggggctggagcatcctttgcaaatcaccgattctaagatcagcgttgaggggcaccaccagaacctcatgttcaacccaaacgtggagaaattcctcctctcttgttcagaatctcacttcttgctcctctctcaagtgtgctgagaaatcaacattttttcttagtgcctcagcttcagacagaggtttaggaaagccaccatcactgccttcttattttgactctcttacctgttcctgtctgtccgtctcacccagaaggaggagagggccacggctgggctaggccattcccaggtttagtgggttgatctagacttcaacctcacgaccttgaacgcctggcccttccattctctcacctctgtgtgcaatcctcccttatgctcccttagtgaggggagccagcctgccagctggtagcagcgtacaacaactgatcaacagtccttcccagctcagagccttttgttcctttctttgtttagagacagggtcttggatgttgcccaggctgaagtacagtggaatggtcacggctcactacagcctcaaactccccggctcaagcgaccctcctacctcagcctcccaaatagctgggactataggtgtgcaccaccacacctagctaattttaattttttgtagagatggggtcttgctatgtttctcaggctggtttttttcgaacccctggcctcaagcaatcctcccgcctggacctcccatagtgctcagattacagacgtgagccactgtgcctggctctatttttcttctttccctccccaagaaagaagacaaggagatgagaaacctcagccctatttctttttgctctgcaaaatccaagccccatctttttcctgttgccaccaaattgagggcagccccatgttccttcactggcttctgacccaaaactcagacaaataagatcttggcatttcgtgggccaaacacaagaggtttcttttctttcttttctctcccctgttccccttttaaaagtgggcctcggaggtgttgcttttcctgctgaaagttccatccgattggatttcatgacaggaaataccttacccactctctccctttctgcctccgcagtgttctctcccttctgtggtacggctcagcctgttttgggctaaggaggccagcaagtcaaactgaaacaatgtattacttggagccaggcgtgtaaaatgaggatgcttgaagtcgagcccagtgttttctctttccaaataaaccccgatgcccccaaatggaaaaatccagctctcagaacataagcctgctggcttctctctggctgaaaggtgctgcatttgagctattaaaaggactctttctattttgcaaaaaccaaagctccccttggaggtttatgctgttccatgggggactgtttctttgctggatgctgaaaacaaaggaaacacaacagcggcgcttgcgtgtgtgacctctgatggattctgagaggctttgacacggcttgtctcaatgaatgctgaggacactgtgaggatggtggggcgcagggaggttaagtgcccagcgttacatgataggaagcagccgtggctgcactggagctaagacttctgacgctgggcgcacacctgtcctcaaccagctgaggctgtcctgacgctctcgttggagggagagaaggaagagtgtctcacagccctggatcatcagtctggtccagatgctcagtcctgatccccttgggtattccacttaccatatgttggtgcttccagcctctggtcctaactcaggggcatcaccctccaggaattgcccatcggcctctgcagtgttgactttgccctttttggatgctgactctgcatttgtgtgagggtgggagatccaccttggatctcagctttggcttttggatgtgaggataaattcagggtctttttgtctttaaaggaaaaaaggctgcattcttcctaccaatccgtcagagctttacttaggaacaaagtgtcctaagcttccgagaaattccctatccctgggaagcaaccccagggttctctgtaagtgacaggaatggttgctctggaggaattctgagttgctgctaactcccgacagcctgcctgaccagggcccctcgcctcctgtcatcctgaacttgattcaggttttgtccttgctaaggaagccaaaagaaagggtcttactccatctttctgcccttggcttcctcattttccttctcctgtgagatctcgaacaagcgtcttgaatggctgcttatgaatagcccgggatgtgggttgggtcctccttcccggtcacccgcctccagggtggacatgcctgcctgcggcccccacctctttgctgcatgacactgtcttcataataaacatctctgggtgacacaagattgatgcctccatagaggcttcccgtggctcacacaatgccccttttgtaggaattcatgtttttctgcagggcaatgcttgctgacactgagctgcttttgccaagatcataacccccactcctcaccccaaagcttttaggaatgaagaatttggagctgccgttaggcctgcggatccgctgggtttctgctcggagctgattgccactgaaggctgcttggaccaagtccatatcccatggaactctgggctgggatgatccgaccccttacaaagggctctccccgggaatgccatgcaaagcatggtccccaggctcctaattcagatctagaagcccctcagtgtctcccagctgcgtgacattttgctgaaataccagagctatccccgcccccattagcctcaactctgcctaaccctccaaggacacaggcaggttggccaacctccactcaggaggctggccctacagtatccaggcagggagcttgggctgttgtgtttccattttctgtgggaaatgtctgaaatgtacattgcaccttacagatcatcagaaagatctcagctggcctttgggaggcagaaggaccctaaggggcgaggggatgtgcctcactgtagtgctgggacggtggcgggggggatgtgcctgactctagtgctgggacggtggcgggaggatgtgcctcactctagtgccgggacggtggcggggggatgtgcctcactctagtgctgcgacggtggcgggggcttggctgtgagactctggggagcagaaagcactcatggacttgtctcctttgtgcctgaagcttccctcgggccgtgtgtcccataggaagccgactctgattcgattaataattataacatcaatgtgtgctccctgcagaaaattcagaggacacacgggacagcagaggatgattagtacggactagaagtcaccaagacccctcctctttttttttttttttgagacggagtctcgctctgtcgcccaggctggagtgcagtggcgcgatcccggctcactgcaggctctgcccctcgggttcacgccattctcctgcctcagcctcccgagtagctgggactacaggcgcccgccaccaggccggctaattttttgtattttttagtagagacagggtttcactgtgttagccaggatggtctcgatctcctgacctcgtgatctgcccgcctcggcctcccaaagtgctgggattgcaggcgtgagccaccgcgcccggctttttttttcttttgtctctctttttttttttttttgagacagggtctcactctgtcacccaggctggagtccagtggtgcgatcatacctcactgcagcctcaacttcctgggcttgttacccgcgggtctttgttcttagagctcccaagatggcggcaagccttttgttctctgacctggggttcttggcctcagggattccaaggaatggaacctcggccatgcagtcaatgttttagctctattagaagccgttggtcacggaggagaaccgcggaccccagcgactagtgttcagcttgattaggacgaaccctaatctgagccgcacaggaacaatggtgagcctctagccccatcgggagcagcaatgggtgcctcgctggatcagaaacgcagcggacaccctgccggatccggaggggtggaagttagtggcgggtctgcgacggcggcaatcagcagtggtggatggtgagtgaaagctcagctcgagctggaacaaacacggcggagaagactgtgcagttgtaagatgtaatagagtgaaaacagagctcccatataacgggaggggacccgaaagcggttgccactaatggctcgaatgcctgggtttatatccctatcattgtccctccccctgtgctctcaggcgacagatgattgactatttctttttttttttttctctctgtccagcaaccacaattgtttactttttggcatgttttcttccattattattttgttttgttttgttttgttttttattgatcattcttgggtgtttctcgcagagggggagggatttggcagggtcacaggacaatagtggagggaaggtcagcagataaacaagtgaacaaaggtctctggttttcctaggcagaggaccctgcggccttccgcagtgtttgtgtccctgggtacttgagattagggagtggtgatgactcttaaggagcatgctgccttcaagcatctgtttaacaaagcacatcttgcaccgcccttaatccattcaaccctgagtggatacagcacatgtttcagagagcacagggttgggggtaaggtcacagatcaacaggatcccaaggcagaagaatttttcttagtacagaacaaaatgaaaagtctcccatgtcttcctctttctacacagacacggcaaccatccgatttctcaatctttcccccacctttcccccctttctattccacaaaaccgccattgtcatcatggcccattctcaatgagctgttgggtacacctcgcagacggggtggtggccgggcagaggggctcctcacttcccagtaggggcggccgggcagaggcgcccctcacctcccggacggggcggctggccgggcgtggggctgacccccccacctccctcccggacggggcagctggccgggcggggggctgacccccccacctccctcccggacggggcggctggccaggcagaggggctcctcactcttcccagtaggggcggccgggcagaggcgcccctcacctcctggacggggcggctggccgggcggggggctgacccccccacctccctcccggacggggcggctggccgggcagaggggctcctcacttcccagtaggggcggccgggcagaggcgcccctcacttcccggacggggcggctggccgggcggggggctgacccccccacctccctcccggacgaggtggctgccgggcggagacgctcctcacttcccagacggggtggctgctgggcggaggggctcctcacttctcagacgtggcggctgccgggcggagggactcctcacttctcagacggggcggttgccaggcagagggtctcctcacttctcagacggggcggccgggcagagacgctcctcacatcccggacggggctgcagggcagaggtgctcctcacatctcagacgatgggcggccgggcagagacgctcctcacttcccagatgtgatggcggccgggaagaggcgctcctcacttcctagatgggatggcagccgggcagagacgctcctcactttccaggctgggcagccaggcagaggggctcctcacatcccagacgatgggcggccaggcggagatgctcctcacttcccagacggggtggtggccgggcagaggctgcaatctcggcactttgggaggccaaggcaggcggctgggaggtggaggttgtagcgagccgagatcacgccactgcactccagcctgggcaccattgagcactgagtgaacgagactccgtctgcaatcccggcacctcgggaggccgaggctggcggatcactcgcggttaggagctggagaccagcccggccaacacagtgaaaccccgtctccaccaaaaaaatacgaaaaccagtcaggcgtggtggcgcgcgcctgcaatcgcaggcactgggcaggctgaggcaggagaatcaggcagggaggttgcagtgagccgagatggcagcagcaccgtccagcttcggctcggcatcagaaggagaccgtggaaagagagggagagggagaccctggaaagagagggagagggagaccgtggggagagggagagggagaggattgactatttctttacctcctgcttttagcctaattggtatttcagtgagtcacttagtttttaaaaagtttattttataccaacatgatgatggtataatgtacacatgataaaaagtatccactttaaatgtacagggtgatgggttttgacaaatgaatacacctgtgtaacctctaccctggtcaagacttagaaatgtttccagcaccccataaagttccctccagtccttttgcagtcagtttgcccctcccacctttgggcaactactgttctgatgtctattagttgtgaagttctagaactgcaaatcaatgggatcctgcaggatgttttgtggccatctttcttcactcagcagtacctttttgatccccctgtgttccttcttgggtctgcaggcttgttctctgtcgctgactaccatccaattggatgactaaacaaactataaatataactttttttatgaataaacaaataagtaaaaagtttatccatttgttctcctattgatggatgtttcacttagttatgttacaaatcttttctgtgtttctaataacttcacaatttttttttgagatggtgtcttgctctgttgcccaggctgcagtgcagtggtatgatctccgttcactgcaacctctgcgtcccaggttcaagtgatcctccctccccagcctcccaagtagctgggaccacaggtgtgcaccaacacgcctggctaatttttgtattttttgtagagacggggtttgaccatgttgcccaggccggtcttgaactcttgtactcaagccatctgccctcctcggcctcccaaagtgctgggattacaggtgtgacccactgcgcccggccaaacgtcacaattttaatgcctgcctcattcatagggtgcctttaagaattgtgctgaatggctgttttattcacaggtgtttaggtttgtctgttgtgataaacatccttatacgcaaagttttgtccaggagagatgcttaaaagcaaatggcaaaatcaaagctccgaacattttaaaggttcttgacacacacactgccacctttctttctctgtacattatgtgtataaaagagcctaaatcagccatctcaacagtgtggaggagtttggctttttcatcttttgcaaattggatgatttgaagaattattccaatggagcagagattattctaatttgcttttttgttttgaagagagactgaacattttcccccatatgtttgactcttatatttcttttttgtgaaataactttaattttctttacccacttacctatcaaagagacgtttccttttttctttctttctgtttctttttttttttttttttttttgagattgagtctcgttctgtcgtccaggctgcagtgcagtggcgtgatcttggctcactgcaacgtccgcctcctgggttcaagcgattctcctgcctcagactgcagtgtgtgccaccaggcccagctaatttttgtatttttagtagagacagggtttcaccatattggccaggctggtctcgaactcctgacctcctgatccacccgcctcagcctcccaaagtgctgggattacaggcatgagccactgcgcctggccagagacagtgttttctcatgtatttgtatgaagtcttcctctatgaaggctatcaactccttgtcgtgtttgtttcaggtatttcccttaatttgatatagtggattggttttgtagatgatgcttctcgattcaatgtcaatgacaaaattatctagccagtctattgtttttgatggtttctttgtgaatttctttcattgtcttaaatcatataaagccctcctataccccaagattaaagaactgttgtattttttacagttttagtttacgcttttaaccatctgtaatttattttggtatatggtttgaggtaaaaatctaaattcatttattttccccaattgctacctcccaattgtcccagcactattcatgaaataatttgtattttcccccagttaacactacctttgtcatacatcaattcttgaatttctgtcaactgttaacatttattaatgcagggtgttttgtttgtttgtttgagacggagtctccctctgtcgccctcaggctggagtgcagtggcgtgatcttggctcactgcaacctccacctcccaggttcaaggttcaagccattctcttggcctcagcttcccgggtagctgggattacaggcgtgtgccaccatgcctggctaattttgtattttagtagagatggggtttcaccatgatggccaggctggtctcaaacacctgaactcaagtgatccacccgcctaggcctcccaaaatgctgggattacaggcatgagcaaagtgctgagattacaggcatgagacaccacacctggtcattaatgcagttttataagtgtagtttactgagacagttttaatacatggggggacagtttaatacctagatcccctctctcttacatcttctttaaagttagctactcttgccagggcaagttttcagatgaattttagaattattctgcaaaggctgaaaaaattccataaagagtcttgactgatttacactaaaccaacacactgatttgaaagaatccgcatcttggcaaattatcgttgtgagttgtattgttaccggggatccttgttcttagaactcccaagatggctgcgggctgcttccaagatggcggcaagcctctcgttctctgacctggggttcttggcctcacagattccaaggaatggaatcttgggccatgcggtgagcattatggctctattcagctcgattaggacgaacccccggcacttagcccgcacaggaacaatggcgagcctctagaccgattgggagcggcaatgggcacctcctcactagatcagaagtgcagcggacaccctgctggatccggaggggtggaagtcagggctggtctgtgacagcggcgatcagcagtggtggagggtgagtgaaagctcagctcgagccataacaaacacggcccagaagagtgtgcagttgcaagatttaatagagtgaaaacagagctcccataaaatgggagggcacccaaagggggttgcccttgttggctggaatgcctgggtttatatcctgatcattgtccctccccctgtgctctcaggcgatagatgattggctatttctttaccttctgtttttgcctaattagcattttagtgagctctcattactacctgattggtcgggtgtgagctaagttgcaagacccgtgtttaaaggtggatgcggtcaccttcccagctaggcttagggattcttagtctgcctaggaaatccagctagtgctgtcccttagtatctagggtatagatcctagggctaacctgaactgggttatagagatgaggggaaggggcaggggagaggtgtggcggcactttgtttttaggccttacatctggaagcttgttaaagctttggcaacagaatttctaaatttggtgacacctgatgatgaaactcccactgtggagctctgtctgggccgtgctagagggtatttgtcattcatccatgaaaccagcgccgcccaaagtctctggtgcccacacagagcaccaggcaaagcaacaaaggactggggtgtcccatctcggcccagttgcccatgccagggtttaattgtaatttctctgtacctggctttgccattgggactcctgggtttcacgtgcaacacagctaccctacctgagagtcctttcacaaagggcaaaatcaatccggctgtctagtttgagctttgcttggggacaggccctgggaatgggctgagccagtcggataagccacagtgaactcatgttgagtggtgatcatggggcagagcagggacaaagtgaggcgatgaagtactggccacagtgaggcttcagtcttacatcgcttcttttgtattttaccagcaagacctactggcatttctcttccttctctgccttcgtttcaaaggacatgggggccattaaactgttatgcccgtctgtgtgaagagaacaccaaataggctttgtgtgagcaataaagctttttaatcacctgggtgcaggcggactgagtccgaaaagggagtcagcaaagggagataggggtgaggcagttttataggatttgggtaggtagtggaaaattacagttaaagggggttgttcacaaggtgcaggagtgggggtcacaaggtgctggtgagaaggctctgatattcattgtccaggagaaggaatgtcacaaggttaattcatcagttagggtggggcaggagcaaatcacaagggtggaatgtcatcagttaaggcaggaaccggccattttcacttcttttgtggttcttcagttgcctcaggccatctggatgtattcgtgcaggcctgggctcagaggcctgacagaaacatgcacccagaggcgggagctaacatcagcgaaagcccatacctctctcaacaagattccagttcctccctgttggccacctccttctgggggcttctgctctgtatcccattggttgtgtgacatcatcagcttcctctaaaaattgcaaaggacacagaatcattttgcctcagagctgggctgcatgagatttagtactgcagacagctctctgtatgtgtgggttctgcatctggggattcaaccaacctcggatagaaaatattcaggaaaaaattgtactgaacatgtacagagcttttggttattatttcctgaacaatataacaattatttacatagtattttcattgtattaggtattataagcaatctggagatattttaaagtatacaggaggatgtgcataggttatatgcaaataccacaccatttgatatcagggacctgagcatctgcacattttgctgtctgtgggggccctggaaccaacctcccacagatactgagggatggctgtacttagaaccagtagtgtgctggtaattgtataacagtcagctctccagaaagaaagagagagagggagagggaaagagagagagacagagagagaatgtgtgtgtgtgtgtgtgtttctcttataagtttcactaatgtaaagaaagtgtggcacatactttgcaaataataataaaatatataatattttaaatataaatttcatatacccaatgaattcttatagaatgcattctttgatttttgtcaaacttgcatctatacccaacctatggttgtaattgactgacaagtatagtttacatgtgaatgttggttggtatttttgtttacattagtgagaaagatgaaagtgaaattaccaagatgtgttgaaacttcatgcattcatcagcgatgtgagtggctttgttgaattggataatagttttggaatactggaagagtatttcttcaacattttttgtgctattcacagtgtgacagctatagacatgatatattttaaagtttcatctgtagtattgtcatattttccatgtctttcttaagtctaggcaataaacaaaacaataaacaaacctttgatttgtaatatttgtcagtttccatggtgtaaatgcacctaccaaggtcaacttcaagctagcaatgtgatgtcactgggtgtagaattaggaagggctgcatctagcacacactccataatgaattaaatagtggattgaataaatagattggtagaaatactataaatatataatatttctaccagtcagataccatagatgtaaataacttcagaagcataagtaataataaaatgtagtaaaataattatgaagacatgagttttcagtatttattacctttattttaatataacttcattttaatataacttcattttaagtttatatttattaaattttgattaatggttgtgcttagtagccagcttgcaaaatttctgaaaatttaactatcagctcccatgagacagttcaacaagaaatagaggagagatgatgacaggacaggagttggtgccaaattaagagaaaagatgcaaccaaacaaggaagttcctgtgccacttcctggacatagtttgtctggatccagataaaggaagaaaacgaacatgtattgagtacctactatgtgctagtcattgattataatcaatcttgtttaattcccatggtggctttgcaacgtttcacgattcttttcagtttataaatgaaacaactggtatttagaaagaagaagtaaattgacaaaggtcacacaggtagtaaatactagagttggaattccagtccaagtccctatgaattaatccaagtccagagttaggagccatctctttttttttttttttttgagacggagtcttgctctgtcgcccaggctggagtggcgcgatctcggctcattgcaagctctgcctcccgggttcatgccattctcctgcttcggcctcctgagtagctgggactacagatgcccaccaacacgcccggctaattttttgtatttttagtagagacggggtctcaccgtgttagccagaatggtctcgatctcctgacctcgtgatccgcccgcctctgcctcctaaagtgctgggattataggcgtgagccaccgcgcccggccgagccatctcatttttatattctgattgtgtagaccatgtctgggacatgttgcccaattctggacccctgacttctagaggcatattatcagaagaggttttagcaaacatggaactactagttgcctacccaacatcgttcttccctattctagctagtgaaactacatttcccaggctcccttgtgcctaggggtgatcacatggcacagctctggccaatcagctgtaagtggaaagccaaaggcgccttctgagattgttttgctttccttatttaagcaacacttcttccttttgtcactgttttttcttgcttcaagcagggacatgaggctggaggtggaacggccatcttgtgactttgaagggacattctcaataatagatagggagggagaaagatagaaggggcctgagatattgataggatcatgaagtaactgcctaaactcattttataagaaagagaatcccttgttagttcacattcatgccataatgaatgaatacatgactgaatggatgagaactaatgcttatggagcacttactatgcagcctattgcagcctatttcacatgcataatgtcagtctgggttactgagtttggagtttatcctgttgcaatggacaacaaagtgaagtttttagcaggagagtggcaaccactgggcgcaagtgtccatccatgcagccaaactcagtgccaaccgagagggtcttcttgatgaaaaggctgtgtcttaagacaaattgtgaatgaaactaagaatattttacctgtttcagagggtatcacagtagaacactatgtgaggggccaggcatatcctactgacctcagaggccagatctgggaccagtgagtaagaatttcaaagaagacagtgagtctatagaaggaagaagttgtttcatttaggaagtcagtgaattccttgtcaacagagatatttacataagtggattgcccatttgggaggaatgtggaagcaggtacaaccaggaagcagtgtggcctctgaggctccctcttactctgaatttggttttatgacccagctctaatgggctcatctttctgtattttgattctgtcaaagcttgaaaagtggccataggactcctgggcccctttcatcttatgtcttataagattccagaaagttggttgatgtgtcttttaaacttgagctgccactgtcccaccaccaggcacacgctcatcaatctctttcttccgtggttttattaaagggtctttcatgtgtattaaaaatgcaaaacatctgcccaatgccagtttcagaaatgcacaaatgtgaaaggtttggtttttacaagttttcttatgacagctgccacaatgtcattaatatgtaaattccattggctgaaaaggttgacttttggtcataaatcggctgtttcctcttgataatcctatctgactctccagctgtctagacaatggaaaaattaacaccatgaaacagaatagtttaaaaacctttggagccaaatacttaaaaaaaatcaaaatccacggcaagaaatgtgagaccaattagttaattatgcaaggaatccctctggggcaccgaccttgaataatagtaagaccttatgtatgaatagcacgataatagcgtgaaaaagtactttccacactttttgatcccttggaatgtgtgactattcccgtgaccttcctgcgaggttataaagaccaccaaaatgtgatacctcatctctccagcattgccatcacactctcatctttaatttttttttaagagaattttttataggagtctcgctctgtcacccaggcttgagtagagtggcacgatcttggctcactgcaacctccgcctcctgggttcaagtgattctcatgcctcagcttcccaagtagctgggactacaggcgtgggccaccacacccagctaatttttgtatttttagtagagatggagtttcactatattttggccaggctggcctcgaactcctgacctcaggtgatccacccgcctcggcctcctaaagcgctgggattatagttgttttaggtgtgagccactgtgcccagcccatcttcaactcattttttgccagaaaatgcaaccccagtccattcagttaggtcagtatgtgtcctaattaagggaaaaaaaatcacacataaatcattttttttaagccttaaaatccttcattggttttccattgcttttgagatcaaaacccctgacattttaacatgattactgtgtgatttggccacagtctacctctctccagtctcatttcttggcagtttcccctgagccttctcccctctgtctaaactgactctttaaaactttttccagtgttcgatgattctccctccacttgcctgccaccatccatgcaccccttcacctggttaacgcctacttattcaaaagtcacttcctcagggaaagactccccatcccaaagtacatcaagcttctttgttacacatcttgatagaaaaatgttcctttcctccagaatagaggtaaacaaactacatccattgggccaaatctggccctccacctgtttttgtaaataaagttctttgtttgtttgttcgtttttctgagaccgagtcttgctctattgccaggctggagtgtagtggcgtgatcttggctcactgcaacctccgcctcctggattcaagcaattctcctgcctcagcctcctgagtagctgggactacaggtgcgcaccaccacgcctggctaatttttgtgtttttagaagagacagggtttcaccatgttggccaggatggtctcgatctcttgacctcgtgatccacctgtctcagcctcccaaagtgctgggattacaggcgtgagccaccgtgcccagcataaataaagttttatttgcacactgtgatgctcattttttttttttttgtattgcctatggctgcttcttgcagagttgagtagttacaacagacactgtatagctcacacaacctaaaatactttctgtccggctctttatagaaaagtttggcaatctctgtcccagagcattggtcttgatttgtaatgatacacttatcattagattatttgattatctgtttcttcttctagactctgcgttccaagcagacaggagctagggtcttgttcaccccatgactccatgtttccagtgctcagcacttggcagttgctcagtaaatatcattgaataaatgaagaaaaagaagaaataagagaatgaaagaaagagaggctgggcgcagtggcttgtgcctgtaatcccagcactttgggaggctgaggtgggtggatcacctgaggttaggagattgagaccatcctggcccacatggtgaaacccgtctctactaaaaatacaaaagttagccaggcgtggtggtgggcacctgtaatcccaactacttgggaggctgaggcaggagaatcgcttgaacctgggaggtggaggttgcagtgagccgagatcacaccattgcactccagcttgggtgacagagtgagattccatctcaaattaaaaaaaaaaaaaaaaagaaggaaaaagaaaaaatggaacaaaggttgggcattactgtgattatctgtgatgctaaaaattctgatcttttgaaaacatatctacaaattcttagacattcctgtcattgagagatggagggtaggtgctcttctctggaaactaggcagcattgaactgctttgaccaatagactagcgtggaagtgcctccatatgacttccaaagctaggtcataaaaggccatgaaacatctactttgttcactggaacactcacacttggagccctgagccatcatgtaagaaaaccaattatcctgtgcctgccatgctggggtgaccacatgtgaccttccagttgacaatgcatcagggtccagcctttcagccatcctcccaaaggtgccaggtgtatgaatgaagccatcttggaccctagaccagcctatcagctagtgaggtactactgaatgatctctgttgatagcatagaacagaagaatcacccagccaagccctgcctggcttctgcatgcagggaattgtgaaatataataaaagggctcttattattattattattattttttagatggagtctcgctctgtcgcccaggctggagtgcagtggcgtgatcttggctcactgcaagctccgcctactgggttcgcaccattctcctgcctcagcctcccgagtagctgggactacaggcacccgctgccacgcccggctaatttttggatttttagtagagatggggtttcaccatgttggccagcatggtcttgatttcctgacctcatgatccacccacctcggcctcccaaagtgctgggattacaggcgtgagccaccgcacccagcctaaaagggctcttattttaagtccctatgttttagacttgtttgttatgcagcagtatctcactgcagcacactatgactgagctggtgacaaaagggtatcttgttaaagttggtgtttatgaaaagtcaccaaaattgcctctttgccacccccccaggcagttccagattggcagagcaaacatttttatgctaatttttccaaataaggaaatgaacacaggttaattcactttaacagatgcgtcaagggcctacaatgtggactgttgtgtccctacaggaactacagatacgctttgtttcagagctggtggggagacactgagtgcttggagggggaagtgatatgaaccttcctaaatagcctctctttgtctttccaggccagccaacctgtgaccttctcacatttaagtagaacaccaagagtgttttaaaggaagttttcaaagactggacaggacagtattcctattgggtggctgccagggaatgctgggtccagggaaggatgggtttgacaatatgcagaatgacattcagggtctggggttctgttccaggaaatggcaattgttggcaatacagtttccaccctacctctcccacctccaggccctctaaaaaatcctcttttcctattttatatttttaataaggagaggattggcatgaagagaaataagtctttcctactgttcacttggcttctgatgggcaggagccaggttgcatggcacgaatgtttccttgttgagttgctctgtgtcggggggtaactgggctctggggggtcaggatcaggggttccacaggggtaggcatttggaggtttatgaagggtggcctatggcctcagggtttggaatatgtgtggatctaaagcaaatgtactaatccattgcagagcagtcctatttcttattcctcccccaaaacacagcaccgtttacctaagtgactttggaaggcagctatgctccccactacacaccagtgccgcactacataagtgacttcggattcctgttccaccaagggacaatttggatagacatttttacccctaagtccataaattgtgatgaaggaaattttaacatgggtctggaaacaaccacccttttctcacggctgaagtaaaatccgatgaaagattactgaaaggtggagacatcataaatcccaaatagaaggataattttacaacagtttggaggctgaagaaaaaaaaaagagacaaaagaaagagctggagctcaatgtatggggagttggaagaaatgaaggcagaaaaattcacccagaagaaaaccgttggagttttccagccagagagcagttctgaactgaaatgaatgaaccagaactaaaactctcaatttccttcctgcgctgtaggaaaattgaaaatctcagtcctcgttggattccagtggaaataattgtctgctcccttaaaaatggtgaagcacaatcgggaccgtgtcccgcctggacatctcccttcggcccctgtggccggctcgaggcctccagccccagcctctgtctcctgactgctgtcacggtgcaaaatgcttttaaaagtcccatgacagtggcattgggatttggcttagaaaagaattgtttttttaaaaaaactcaatttgtgcctgtcccagaacagctcactaaaacatgctagagacacacagggcctttgcctcacatcttcgcctggcgtcttcggccaaccagaacctggcccgtgagactcgtgatctccttggcttcaccggttcttgtccttcatctacaaatcgcagttaaaaatgcattacccccctgtgactgttaggcaggtaaataaaagtgatacacacaggagcggcttcaagttcctgggaaggataggattttacaaacccaggtcgtgatcaggagtcgcattgagacaggagcagctgactgcgtgggcgttgtgtaccccggtcctcctcctgaaaaaccccaagtcctgtcagtcccaaggggccatctcctcctccgtggcttccccagccttggggtcttgggggtgagggtcagaggcacctggagaaacagatccctggaaatagaacaggacggaagaggtgcaagggctcctctgcgactattaatgaagcacgggaaaaatccatttgtccccatgcctttgaagccggctgcgatagaagaggctgccattctgtttttccaaatgggaggaaacccctgtgctgctggtgcctggtcctgaaaagagctgtgttttggagagcagaggaaagggaggatggcttctgcccaggaaaacaaaaatggggctcccagaaagggtatttggggaatgttgtgggggcggggattgagatgtgtatttggggactgcagtttctttctttctgtttgagacggagtttcactcttgttgcccaggctggagtgcaatggcacgatctcggctcactgcaatctctgcctcctgggttcaagagattcttttgtctcagcctcccgagtcgccgggattacagaggcctgccaccacgcccagctaacttttgtatttttagtagagatgaggtttcaccatgttggtcaggctggtctccaactcctgacctcaggtgatctgcccgcctcggcctcccaaagtgctgggattacaggcgtgagccatggcgcccggctggggctgcggtttctaaaccctgttttatgagggtggttaggacgtggtatctgggggccagcagtgcccttaagcttggccggcagggtggagggctgccctgggactgtgcttcacagagccacgctctgtaactcctttggctgtgcccctccccaggagagcgtggagtccacccagagcttacaaaagtcccagcagggcacggtcagactagagagagccccaggtgcaaactttaaggaggcactcacattccagatggtgcaggcgcagaggtggaatctgtgagtgggtgcccccttaaactgggctccccagggcggctcttttgcttgccctcatcccagccctggccctagacaacttctgatactttaggaccccagaattctctgcccaaatggctagagtctgggagagaccaccttgctggggtgaggtggctgatacagggagcatgaggggagcacggacacacaggctggagtgtccactctgcgtgcatgaggctccttttgtgtaggatacacagtgtagacacaacacgtggggtatgtgggatatgcggggtaggtgcatgtgtgtacaatgtgtgtataatgttgaagaagtatcctttattttttgagactgcaccctgtcgctcaggctggagtgtggcgacatgatctcggctcactgcaacctccacctccggggttcaagcaattctcctgcctcagtctcccaagcagctgggatcacaggcgcataccaccatgccgggccaatttttgcatttttagtagaggtgaggtttcaccatgttgcctaggctggtctcaaactcctgacctcgggtgatccacccaccttggactcccaaagtgctgggatgacaggcgtgagccaccgcgcccggcctgaagaagtatccttttattcccaccctgctcagtttaagaaaatttacatcaggaatcgagtttttctaacacccttcccaatgtcttttgagctcattttacacataataaatatttggaagctgagcggttactagtattagagttgctgcatctccagacatgaccagagtaggaaaaccggagcgcacttggatagatattgagtctcacccacatgtaaagtgctgctattgctgcaattactcttgtgcacaaaaacgagaactctttttctcgaagttcacaatttaactttccatcgtggcaactcaggaatccaggcgtggaacacttaggtatccatgttctctgctcttccatccggcttcctacaacatggtggcaggactttgtgtggataagtaagcaggtgaggcctctgctcagttgcagggtccagtggggcacctggctgtcaggttccagggacaggcggaccccaatgagaggagctggaatagtctgtgtggtaatggggtatcctggggaagagccattgtgtgtgtgtgtgtgtgtgtgtgtgtgtgtgtgtgtgtgtgtgtgtgtttgtgtagctaccatgagatttgtggtctgtcttcacagtcactaaaataacagattacatcattctggaggtgggattctattttttaatttatttaacaaatttatttttccagattatgcttacatttatttttttccattaccattaaaataaaaactatacattttcgatttcctttttttctttttttttttttttgagacagagtcttgccctgtctcccaggctggagtgcagtggcaggattttggctcactgcaacttctgcctcccaggttcaagcgattctcctgcctcagcctcctgagtagctgggattacaggcacccgccactatgcccagctaatttttgtatttttagtacagaccgggttttgccatgttggccaggctggtctcaaacacctgacttcaggtgatccgcccacctcagcctcccaaagtgctgggattacagacatgagccaccgcgcccagctacattttcaatttcttatagaacttatatgcatctagatatccatagatatctgtagatttgagaaatagttttttctttccagctttagtgaggcataattgatggacaatgaattgcatgtatttaaagtatacgatgtgatgggttttgacagatatatgtacccaggaaaccagcactgtaatcaagataataagtgttttcatccccatcccccagctgctagattctttttggtgatgtatttagtgtgtgtgtgtgtgtgtgtgtgtgtgtgtgtatgtgtatgtgtgcgtgcacgtggtgtaccacatgttttgatatacatatgtatagtaacatgattgcaacagtcaaacaaattaacacggagctgggattttaaagaccatgctatcctctctctcacttgggaactgaggccagagagaggacgggtggtccacagccactcgagtcagataccagggctctcgccccccagcgctgacagatgagcctgtcactgcatctgtggttgaccagagaaatagaaaagttgccagaagagcctctaaagaataacttttaaagttacgtggtgctgctttgttaattttccagacaaattagcttatgtctcttttggttgcaagtgacagaatatccaacgaggttaagctctaacataatttattgccttatttggccaaagttgcaggctttgggtgcagctggatgtaggggcctcaacagtgtcatcaggatgtggtttgaagcctctctcgaattcttgtccccatcttctccatgttgagtctgttcttgggcttctcctgtggccaccggcagcaccagtctcaccaggcgctcacaagatggcagcaccagtgcccgctcttggaagaaaagagaaaaccgggccgggcgcggtggctcacgcctgtaatcccggcattttgggaggccgaggcgggtggatcacctgaggtcaggagatcgagatcatcctggctaacatggtgaaaccccgtctctactaaaaatacaaaaaattagcagggcatggaggcatgtgcctgtagtcccagctactcaggaggctgaggcagcagaatcgcttgaacctgggaggcagaggttgcagtgagctgagatcgcgctattgacactccacactgggcgacagagcgagactccgtttaaaaaaagaaaaagaaaagaaagaaaactggcgcctgggttccagcattctcattggctcctgtggagtcatgtgtcaacccttgagccaatcacatggctgtgggtccctgggttcctgctgcctgggtggggccccatctgaaccccttctctgagagctcttgggtgtgggtccctggagggaaactgggggctgtttaggaagaaaatcaacatgcccaatgtctgctggatcagtgaacccgattatgataaaataaaaatatcgagaactctcaaatttgcctaaacctgggcaccccaggtgtttgcccattagtgcctctgtatgagtcaccttggttttctaggttcatggatctaccccatgtctccacattcttggatatttataagaacctttccacattcagagtggggctagaggaggaaaaaacttacttgcttgattaattaaatcaattacttaataccctaaagctttctgatgctgtaaagtgcaggtttcatatactgggcatgaggggttttcatagactcgacttgtgttgcaaattaaaacaacgttaaattccttagtaatcctagcagaaaggaaaaaaaaaaaagtaagaaaaaagaaaagggaaaataaaacccctcttatttccaaatcactaccagtggaatttaaaaaattatttacacacttagctgtgagtccctttatacctgacaggtttgccagtaaggctggagcaataatttaaaacagaagttgggagtatggataatgaactccctctcttttccaaaataaatgtaccatcggatccacaagagaggtgacttttcctaagaaaggactgtacgtttgggagccaggggcccctgatgctgtgtgaggtaagccgatagcacagtgtgttactgtctgtggatgcgagaatgaaatgagggctgtttctttgatttatagtggaaggaaacaccaatttcttgtcacagatcattacagttgaatttaggtcaaactcatatgcttatatggaattactaatgcatggaggtactttttgctttttgtttttaactcgccaatcattatctacaggatttttctcgggggaggtgggggatggaatttcactctgacacccaggctgtagtgctgtggcgtgatctcagctcaccgcaacctccgcctcccaggttcaagaaattctcctgcctcagcctcctgagtagctgggattacagacatgtgccaccacgcccagttaatttttgtatttttagtagagacggggcttcaccgtgctggccaggctgatcttgaactcctgacctcaagtgatccgcctgcatcggcctcccaaagtgctgggattacaggtgtgagccaccgtgcctggccatcgactgaatattatactgaattttattttgaaaacagagaagactccattctctgcctcctgatgtacacattccggaaggggtcattgttggatggttgagtgcattggggttatattgaaatggatttgggaaggctctacagcaaggaaggaatcttcaggtctctagaatgttcctaggctgcttctcagagtgagagtctgtagtggacactgccagggtccaacccatatctctccaatggccatcatgctcaactcaactcccaaacacctgcaccctggaagaccacttttcccagccagcagctggaagtgctgggggttccactgcccccaagaaaccctcaaccaatggccctaagcagttggtgtataaataccccagttcccttgttcctcaggtggcatcattcttctttaaaaagacttctttattttgtaattattttattttactttattttatttatttatttgtttttgagacagagtctcgctctgtcgcctagactggagtgcagtggcatgatctcggctcattgcaacctccgcttcccgggttcaagtgattctcctgcctcagcctcccgagtagctgggtttacaggtgtgtgccaccatgcctggctaattttttgtgtttttagtagagacagggtttccccatgttggccaggctggtcttgaactcctaacctcaagtgatctgcctgccttggcctcccaaagttctgggattactgacatgagcctccgtgcctggcctattttgtaataattttaaacttacagaaaatcgcaagaaagagctgagagtttccatatacccttttcccagattcctctaatgtcgaaatcttgtacaaccacagtacgatgatcacagtgagggaactgacatggatatgatactgttaatgaaactacagaccgaatccacattttataggcttttccatgaacgtcctgcttctgtcccaggatccaatccagagtcctcctctgcctttagctgttatgtctcgagtctcttccttgtcatggtttttcagtctctcatgaccttgacatttgtgaaaagcactggtcaacgattttgagaatggccctccatttggatttgtctgccgttctcctgtgttcaagacgaggttatgcattttggcaagaatgccacagaggtgatgttgtatctgtctcgatggcgttgtgtcaacgttaaacctcaatcactcagttaaagtagtgcctgctgatattctcctctgtaaaatttctatttttttcctttgtaatgaataacttccttgggggaggaactttgagaccttgcaaatatcttgtttttcttcgaactttcgcctactgattttggcatccgctggtgggccctgcgagcaacaatggctagtgtggtgtttgcctgtgtgacgattttctattttctttatttatttactttgaatttattaatttattgtttaattttatctatttgtatttaaatttattgatgtgattattatttaatttattacatttattaattagaatgccttttttagggaggatgtcccttctgggtggggtaattccaggtcgtggactttgcaccattgcccagtttcctcgtggggtcaactccatggcccgcaagagtagcttgcttgaaacacaggacgcccctgtggctttcttcccctccctgccttatttgctcactccctggggatacatcccacaccttccaaagagcatcgctgcacttaaatcctgactcaggatctgcttcttggatagtccaaacccagacagcccctctcacagtacagcacttccccccacccccacagatgggacaaggacggagaccaggtcactccagggagagccgtggctagtggaacagctccaccgtgaaatgggttgaggtcgaatccaaaatctgaatgaaccctttattccacctattccccagcagcctcttttctttgtgaacgtttcccctatattttacctaaatgaatgcagctgaacagactgtgctttagagcctctggaagacacccaacagaatgttctgaaaaatgcgattatttttacacaaaattgccaatgtaaattcaacttcttgtgaccagcctgggattcccacacaactgcatgctgaggttgttttccagaaggaccgaggatgtccagcagagactgatggagctgtgaatagcccaaggtgctgtcttacattgtaggcagccgaggggttgacaaaacaaaggctttggagctaaatggtggctgatagactttggcaccagcttaaatcagtgaatttcacagattttggaacatctagcttctgatttcagagacacgtggtgtcctgatctctggtgtctaggaagcgtggctggggggatgtgtggtagtgtttggcttagtggatcaacacaccagattaaaccactagatggtccccctccctcttccagccccctccctcccccagccactgattgctggtgaacaggcagtttgggagggctcaggtcaggcatctgcctgaaaaaagggtcagggatgtggataaaacagagattgacccactcttcccattgagccttttcccagttttgaaattttcatatcattttctgctaaaaatattcttgagggaaaaaatatttttttttcaattttagattcctaggaggacaaaggggggaaaatgcatatgtaatgagagatgcaaatctagaacaaattcacactccattacccaaaaccttcgtgttatccaaagtcaggtatgtttggagatgcggcattttttctaaactttggaaagtaatatgttacatatattgtatattacagaacacccccgacccagcagggtttggggaagaactctgtaatagcacgttattttctgtagtaaatttcaggaatagtcacgctaagctggatcaataaaggctctaagtcaactcacatcacctcagttcaggttttggtaccaaatgatttataagaaaacttgtggttttaagacctttcttttttttcttttctttctttctttattttttcttttcttttttttttgagatggaatttcactcttgttgcccaggctggagtgcagtggtgcgatctcggctcactgcaacctctgcctcccaggttcaagtgattctgctgactcagcctcccgagtagctgggattacaggcacgcacaaccatgcctggctaattttttgtttttttagtagagacagggtttcatcatcttggctgggctggtctggaactcctgacctcaggtgatccaccttggcctcccaaagtgctgggattacaggcgtgagccacctcacccggcctgagacctttcttgattctggatgtgtggatatgggtaagggattgtggacctatttctcctttctagcctgacattagaaattaggctgacccagagaagcctgcagtattattcctctttgttggaaaagtttgcatcaacatctttgatcagaccaaccagaatctggtacaaaagttgcttccctgttttttttgtaagccaaggtgtgcttttggggagggagacaggagtgcagatgaccacgagaggcctctgtgctgtgggatgtgggtgagtggggagaggcaggaaactggaacctctgcatgggtttgacctccccttccccagagtccggccaggttccgtagggctggctacaaacaccaccatctcgcttgtcatcctgaggatatcatttttgggcagccaagataccccaaaatggccttatttccttagaggggtggctcagaaagggagagcagtttggcaatgaaagagacacaccactgcaaggaaaaatatacgcccactgtcagtttattttcattgtaaccccagagtcctctcgagggtgctcactgagtactataatttgctgtgcaccatttagagaagaacagaattgaaacatataaataggactttgaaaatagcatggaacacagatcctttctttttttcctttgcagaaaagatattttgaataagtctttcaggctttttgatttataggtttgctattaaccgtggcattgagcagtcaaatacaaagcatgcacggctggagttcaccgggccctgatgagcacggttttcacagaatgagcaagccagggcttgtgctggtttcctgcttctgctgtaataaatcaccacaagcttagtggcttcggacgacactcatttattatctcagagtgctggaggtctgaggtgtgagctctgaaatgggcctcatgggctaaagtcaaggggtcagcagggctgcattccccttggaagctcccgaggaggacctatttcttgcctcttcccccttcttgaagccacctgcattcctcggctcgtggccccctcccccatttgagtctttctgatgcctcatcactttaagcttctcttctgcctccctcatccatcttttagggactcttgtgactacattgtgttcacctgcatactccagaataatctcattattattattattttgagacaggctctctctctgtcacccaggctagagtgcagcggcatgatcagggctcactgcagcctcgacttcccaggcttaggtgatcctagcacctcagtctcccaaatagctgtaactacaggtgtgtgcccccatgcctggctaatttttgtatttttagttgagatgaggtctctccatgttgcccaggctggtctcaaactcctgggttcaggtgatccacctgccttggcctcccaaagtgctgggattacaggtgtgagccaccgcacctggccaatctcctcactttaatgtccactaattgacaaccttaatttcacatgtaaccttaattgccccttgccatgtaacctatttgcagcttcccagaattaggatgtggatatctgtggggtaggaccagtattctgcctaccacagggtgaatcccaaagatatggagtgagctggccataggagaagaaggaagatgtgggcagggaggagagagactattgtgtatcaaataccattactcttgataatggcatgtattaagtgctcaccagtagctttgcccagtacctactctggtctcatctaactctatgaagtagatactatgactctcctcattttacagatgagggaaaacagaagcttatagagcagtgttgttcaatatggtaacctcgagccatatgtgaccattgatgtttaaatacattgactaattaagatgagttaatcaaactgtggcattagacaacaccttaagccatacacatgtggctgttggctaccgtattggacagcacaggcgctgatcatttccatcaccgcaaagttctctgggacagggctgttgtagaggataaatatgggtcccaacatcacataactggaaagtgggagaatcaagattagaacctggtgccttaggcttagagccttgtcttggaatcaccctattacacagacgtccagtattcatttctctgaccacatctgggagctttgaaatctgccatatgttgggtaaaactactctacatctcagccacaccacccttatttaaccccttcttaagaacacgtgggttctggccacgtttcttggatgttttcatttagcacctggcgtgagtcataagaggaaaccaaacgatggtcagcttggcctttctgcttccccagtagctgcgcggcacaaactagttgcagctgtctctttcctaccccttcacttgcctcccaaaggtggatggaagcctcctggttaccaaatgaataagaagtggaaggtgaccgagggccatgaatgatcaaattaaaggaaatggcacatattcctcaagcggactccttgtgctgcagtgttggcgggacgagaagtgctgctttgccgagcccagcatggaaaataatccaattttcctctgactttttctgttgaggattgccaaagaagatggcctgtttggcttcaataataggaacagctaacgtttatccagcgctcagaacacacccttgtcctaatagctccccatggattaatccattgccctatgagacaggtgctattaatttcacctccccgaggtcacagggccagtcatggtggtgcaggatgtggaccaggaggcctggcttcagggtctgggctcttaagctggtgtagtacttcttctctaccttgggtatgtcaacccggaggccactttcttccctttttcagatgcctgtagtttgctgatggagccagaaactgatgtgtctggtgttgaagagaggcaagctgggtatgcccagccctgtctgtggtttgaagcaggctctccacctcttcattgctgggtgtcagcactggccccgggaggtctccaggaaggatccgggccatgttccgagctacagggaacggagtagaagtgtgaaccaggctgagtgtggtggctcacacgcttgtaatcctggcactttggagaggctgaggcaggaggatcacttgagcccaggagttccagaccagtctgggcaacatagtgaggccccatctctactaaaaatacaaaagattagtcgggcgtgatggtgtgtgcctgtagtcccagctactcaggaggctgaggcaggaggatcacctgagcccaggaagttgaggctgcagtgagccgtgattgtgccactgcactccagcctgggtaactggagtgagaccctgtctccaaaaaaaaaaaaaattttttttaattcataaatgtgccactgcactccagcctgggtaactggagtgagaccctgtctccaaaaaaaaaaaaatttttttttaattcataaatgtacggattacacagtcactaaaagtgtcattgattcactattgtctctattccaaagattaattattaagattaatagttaagattaatatgaagattaataattaagattaattgtgcaataatagtattaaaaccagaatgataggaatgggagcacatcttatgatttctactttgaaaaagagaggaatttcatttgtggcacaagagtaattttaaaaaaaaccccaacaacctgggagcatgcagggatggttaaaatgaaacgtggagtccagcgcgcaggccacctgacaagtattcccccgtttccacttctctcttgccatgctttggcttggcttccatctctgggattttctttcaattcattgactattcaaagggcttcattttcaggtcattttccacgtaagactttaaccctttcttctctctgcccatcagcctgaaaagtgcttccttattgcctttcttttctactggtattgggctgaattgtttaaacttcaaaaatatgtacataacatttaagagattttttgtttgtttgtttgagacggagtttcgctcttgttgcctaggctggagtgcaatggcgcgatctcggctcactgcaacctccgccttcctggttcaagcgattgtcctgccttagcctccccagcagctgggattacaggcatgtgccaccacggctgtctaattttgtatttttggtagagacggggtttctccatgttggtcaggctggttttgagctcccgacctcaggtgatctgcccgcctcggcttcccaatgtgctgggattacaggcgtgaaccaccacgcctggccaagagatttttataaattacgaagaacaaagaagaaaacaaaataaacaaaaatggtccatatctcccataatccctgtttacattttgttgttgttgagacagggtcttgctctgtcgcccaggctggagtgcagtggtgtgttgtggcttactgcaacctctgcctcccaagctcgagcgattctcccacctcagcctccagagtagctggaactataggtttatgcctccatatctggctaattgttttaaaattttttttgtagggacagggtttcaccatgttgcccaacccgacctcaaacacctaggcttaagcaatctgcctgcctcggcctccctaagtgctgggattacaggtatgagccaccatgcctggccctgtttatattttttaaaatccactaaaatttttaatgcttgataatttgaacagtgcagaaaaatccaacacggaaaataagctcctctctcctatttttcctgcagattctgcttcctaggactgtgtagatttagtaaattaaaatacaggatgcccaggtgaattcgaatttcagaggaacaacaaataattgtgtaacataagtatatcccatttaaataattttttggtataagaatgtcccatatattgcatgggttatacttacactaaaaattattcctgaaaaattatggagaaacacaaggctggcagcattgtaggaaatgggttttttctagatctaagggttgaatgatacctgccacttggaattcatgaaattactggttgttgttgaatcttatttcaaacaacagaatttgcttttttttttttttttttttttgagggagggtctcgttctgtcacccaggcaggagtagtgcagtggcgtgatcttggctcactgtagccttgacctcctgggctcaagtgatcttcctgcctatttttttttttttttttttttttttttgagacagagtctcgctttgtcacccaggctggagttcagtggtgtgatctcagctcactgcaacctccgcctcccgggttcaagcgattattgtgcctcagcctctgagtagctgggattacaggtgtgtgccaccatgcctgggtaatatttgtatttttagtagagacagggttacaccaatttgaccaggctggtcttgaactcctgacctgaggtgatcctctcacctcggcctcccaaagtgctgggattacaggtgtgagccaccgcacctcccctgcctcatttttttgaattttttttttttttttttgtagagatgaggtctcactggatgttgcccaggctgatcttgaactcctgggcttgagcaatcctcccaccttggcctcccaaagtgctggaattacagatgtgagccaccatgcccggccagaatttgcttcttatttagtgcttaaagagctggtcgatttaaattttcctcattactggatgttgatcatgctgatttagtggacacaggcaggagcttttctcttccttctgctgttaagcaggattcctcccaagcccagacgtctctggatcatctctggatgttagctggaagttggacctcagctgcaaggtcattatcatctcctctgatcttctgtcctcgccctctccgcttccagtgtggggctcagcatgtgtatttactcacctcgcactgtttgttttcagattgaatccgtgagaaggaagcaaaggcctctgtgtgtttactttgccctgtgaaagccagcccagggggtcaactccctctcccacagccagtgcacccaccccccacccacaccgccccctcagaaaccttgccccttgacaatattttcaaaccttatacataatctcaatccattttaatgttccaatccattacacatacccatgtgcacaggggtgagagtcaaaatatttaacatctgggaaggccaggaggctgacccatcagatctggtctcaaagctgagctgtgtcctggaagtcccctgctgtgccagaatcaacatgagagtttggggaggggtgccccaaggcagtaggggggcagcaggtgggcagcagctgtctaacaacctgtaaaaatgcattttgatctcttaaccagtagaactgtaaggctgagcaccagctgaatctcagctttgcatatgtaaggctgaaaccaaagtttcacaaaacaatacctacttttgaaaccacctttgcaaaattataactgaggaaatgacaacagtgaaagaaatcagacctaaccgactccatctcgcttctaacctttaagctgtccttgttcattcctgggcatgggctgaacaaactttgggatggaattcagttcatggtttgactctgacacagaattgataatagccgtttccggaaaagaccccctgcttgcctggggaccagtctgcctttgcaggactaacaaattagctacaagatgagaagttacagtttaggggtcatgcagcctctggctccaagagtctaaacccccccagattgctcctaggaataagatcactgttgtaaaacctaagatcagcgcttgagatattttgcagagcctgcattctgatgcaccagctaacaccacccagaccagtcatctggctcagccagttctgctatcccacccaggaacagaagacagcaagaaaaactcacttcaaacccctgattccatctccagtctggccaatcagcactccccatttcccaagcctctaccggccaaattatctttaaaagctctgatccctgaatgctcggagagtctgatttcagtaataataaaactctggtctcccgcacagccggctctgtgtgaattactctttatccattgccattcccctgtctaggcaccgggcaaggtgagcccattgggtggttaacttttacgtctgtgacacattctgaggtgttttgtctacttctgttttgttctgttccatcctatgccaactcattctgtcattaaaaaaaagaaaaaagctgaccaggcatggtggctcacgcctgtaatcccagcactttgggaggctgaggcgggcagatcacctgaggtcaggagttcaagaccagcctggccaacatggtaaaaccccgtctcaactaaaagtacaaaaattaggtgggcatggtggtgggtgcctgtagtctcagctactcaggaggctgaggcaggagaatcgtttgaacccaggaggcggaagttgcagtgagctgaaatcgcgccattgcactccagcctgggagacagagcaagactgtcttaaaaaaaaaaaaaagaaagaaaagaaaagaaaaataagaaagctaacctagacttgctaaattgatttaataaccatgaattggtctcggccagtttgaaacactgctgtgatctggtagctctcaaactgctcagtgcctgagacctacctggggaagtctgctagacatgtggatcctccattctcattctgctggcccagagcctgcatttttgaagaccccaaagtgattctgatgcaggtggttcaggagcgactccagatggaagggtgtttcctggctgaaaggctctggtttggtttttttcctaaaagcacaagtataatcataatcccaagtgctgcattttccttagaactgaacctgctcagcacaaggcatgttgttcctagtgacaacactgatggcttttgccataaaaactgtctttgggcaaggttatctccaaggcctgggattcacctgtgcctctgacctgatagtcatctggtgctctgagtgctgcttctcaaggcactgggtggggaagaggaattttcaactgtaggatgtggttcactcaccgagccaagaattatgggtagaccccacataacagagtagaccagttggcaacccagaacaaattaggaaaaattggctcaaactgtaatccatcctgcacacattattgtctccattcattaactcacgtatgcattaactcagctagttttattgagcacgtactgtgtgtcagccctcatgcttcatctctgggacacagtggtgattaagaggtggccttgcttgctgtgcctacagaggggcagatggaggccaggtgtggtggctcacgcctgtaatcccagcactttgggaggccgaggcgggcagatcacgaggtcaggagatcgagaccatcctggctaacatggtgaaaccccatctctactaaatatacaaaaaattagccaggcgtggtggcgggcacctgtagtcccagctactcaggaggctgaggcaggagaatggcgtgaacccgggaggcggagcttgcagtgagctgagatcgcatcactgcactccagcctgggcgacagagcgagactctgtctcaaaaaaaaaaaaaaaaaaaaaagaggggcagatgggtggcttgccaggggtgaaggcaagtcttccatctcgtcttcctttcctcaacaaaactttgctcaaggcagtccaatctctgtgtagcatgtaaataaaataaaaaaagaggcccagcacagtggctcacacctgtaatcccgacactctgggaggctgaggcaggtggatcatctgagaccaggaattcaagaccagcctggccaacatggtgaaaccctgtctctactaaaaatacaaaaaattcgccaggtgtggtggcgggcacctgtaatcccagttactgaggaggctgaggcaggagaatcccttgaacctgggaggtggaggttgcagtgagctgagatcgcaccactgcactccagtctgggcaacagaggaagactccatctcaaaaaagtaaaataaaataaaataagaaactgcttaatttcccaaataataaatacatgatgttcttatgaaaattcagagaatactgtagactaagaagtaaaacatgtcttgccttccattcacctttcaatctcttctttccctagaagttaactatagtattgttaccagcttgatgtatgttttattattattattaattattcaaagacagggtctcactctgtcacccagccagagtgcagtggtgccgtcatagctcactgcagccttgagctcctgggctcaagcaattctcccgctttaacctcccgagtaattaggacgagaggagcgtgtggcgatgcccagataacttgctttacttttggtagaaatgggatctactgtgttgccccggctggtctccaactgctggcctcaagtgattctcccaacgtggtcccccaagtgctgggattacaggcatgagtcactgcacccagccatgttcttgtcttttcttaacatttatatacatgtattagtactcatagaagtatttggtattgtctaacataaatgggatcatatgtacatatcattctgtaacttgcgtttttgttcaatgatatgatgttttggatgtattctcatttcaatttgtgtagtagataacagatcaaccccccgcgttctttctgactgattcaggagttagattacatggtgtgcttgtaccatagtttatttcactgttccccaatggatggcatttatattgttttcgagtttttgcgattgccgcagatgctggagtgagcgtccttgtggtacctctttgcacacatttgcttatatttttcaaagatggacctctaggtgtaaaatttctggttctaaagcagcagtttgtggacctggctgtacatttgaaatacctggggactctttcaaacaccctgtcagggccacaccccaggccctttttttttttttttttttttgacggagtgtcacactgtcgcccaggctggagtgcaatggtgcgctcttggctcactgcaacctccacctcctggattcaagcgattcttctgcctcagcctcccaaagtagctgggactacaggcatgcaccaccacgcccagctaatttttgtatttttagtagagacagggtttcaccatgttagccaggctggtcttgaactcctgacatcaagtgatccgcccacctcggcctcccatagtgctgggattactggaatgagccactgcgctaggcccactggacccattaagtctgaatctctgggatgtggagctggtcctcagaatttcttcaagagccccctaggtgattctcatttgtagccagggtaagaactacttgtcttaaagtgtctgcgtttaaaacctaattgtggcctccaaccaggagtgtagaatgcctgtttcccggacctttcccacattgaacattgtcaaacttctagttgtgaaaacctaagggtgaaaaaaacaaaccttgttgttgccatggtttgcatttgtcttaactactagcatggtggagcagctggtcaaatgttaggcaaccacctttacttcttttgtgaattattcgttcatattcattgctcactttctgtgtgttccttaatcttgtgtaggagtcttttataaaatcttaatgtgaatcttttgtttttatgtatgttgtaactaactttacctgtaatgtgaactttgtgtcctctattttttttttttttttttttttgagacagagtctcactccctcaactaggctggagtgcagtagtgtgatcacagcacaccgcagccttgacctcctgggctcaagtgatcctcctgcctcagcctaactgagtagctgggactacaggcgtgcaccaccaagcctggctaatttatatatatatatatatatatatatatatatatatatattttttttttttttttttttggggacggagtcttgctctgtagcccaggctcgactgcagtggcttgatctcggctcactgcaacctctgtctcctgaggttcaaacaattctcctgcctcagcctcccgagtagctgggattacaggcgcccgccactatgctcagctaattttttgtatttttagtagagacggggtttcaccgtgttagccaggatggtcttgatctcctgacctcgtgatctgcccgcctcggcctcccaaagtgctgggattacaggcgtgagccaccgcgcccagcctaattttttatattttttatagagacagtgtctcactatgttacccaggctggtcttgaactcctgggctcaagtgatcctcccaccttggcctcccaaattgctgggattaccacgcactttgaggcaccacgcccagcctcttttatcgtgtaaacattttacattttaatttctatgttttttccctttatggcttctaggtttcctgtcttgttttagaaatcttatttaccccaagatttttttttaaaaaaacacaacaaccatgcccccttgaaacctatctcatttattttcttttaatacttgtataggatttttaaaaaatgttggcattttaatgcatttgaaatttccatttgtgaacagtatgtggcaataatctaattttattttattttcaagatgggtagttaattttcctcatactgtttattaatctatcttttcccttgtgatttaaaaatgtcatcttatatactaaatttacatttacatacatacacacatatggtgcacatgtatacatgtgcatcctccacacacacagctttttctagacactctttgctgttccatctatctatgtgttcaatctgtattgacacagggtggatactttaagttgtaaacaactaaaaattcaatgtaaactgattaaaacaataaaacaaatgtgcagctcatagctgagatgttcagggcctcagaccaggcaagatccagcagctcaggtgatagaataaggacctgcttcctttctctgtgttattggctccacctccttcctgttggtgccatcttggtctgaagccaggagcttccaaggctacatgcttccttgatcatatccaacatgaaaaagggggagtctacctaaacaaattccagaattgggtcttgttgtcctttgacttgttttgatccaagaactatggttggaagaatggaatacactgactaccttaagccaatcaaatccccgctagtgttggggatggggtcaaccacacattcatccattggctgggatattcagggtattctttgggagcaggaagagggggttagatgctggagatggcaaggaatcgccaaagcacctacatgtaccagtatcacactgttttaatggttacagctttgtagtatgttttaacatcgtactgttgtttttttacacaattttatagcttttcatcttagatggattttggaatcagcttctcaagttatatttaaaatccttggccaggcatggtggctcacacctgtaatcccagcactttgggaggctgaggcgggtgtatcacctgaggtcaggagttgaagaccagcctggccaacatggtgaaaccccgtctcaactaaaaatacaaaaaaattagctggacgtggtggcaggttcctgtaatcccagctacttcgggaggctgaggcaggagaatcgcttgaacccaggaggcagaggttgcagtgagctgagattgcaccattgcactccagcctgggcaacaagagcaaaactctgtctcaaaataaataaataagtaaataaataaataaaatcctcctaggagttttcttggtattgcattgaagatctggattcaagtcaacatgaaatcatcatctttacaaggttgaaccttcttacctaaagaactagataaatcttcctgtttattcagatctactcatggtatccaatgaagttttgtaatcatcacataggtcttgggaatttcttgttaattttatacctcattattcttcgtttttttgttgttaataagatggatctttttgcccctggcattttgtaattggttgaggctgctgtaaaggaagtttactggtatttgtatatttatcttatatctggccactgactgaacctcttattggctataatgctttttcagttggttctcctccaagcagtctttacctccttttcctcctctgtgttctgcagtttggctcattctctcctcttggaatcatatgtagttccttaattgtcagctccctcaaccttctcttatagtttctccttctttactttgcctcctccatcctacactaccttccttccccaagaacggttccattcaatgagtcaaaaacattcaacaccttcaggtttggtgtgtagtatgaagtggatagtttcccccacatttcccttaatgtataaaattctttgtcgaataaattgaaggctgtcatttacaagctgccatactgtagggtagtaattattcttatacttgttatccagtttaactgtctaacagggccagtgaaataaaccaccatgtttctggagagagaaactcttttgggggttatggcagggtgtaatttaactctctttgttagagctccaatacatgttttcttgccactgcttttggagatagggaagcaagtatttttgcccaaaattcattagatttttaaaaattgcatattttactctttacaacaggctagatagcatagaaacaggttgctcattgcaacagttagataacttagaaataaaaagcatattaataatccccctaactcccacccccaggtaacaaatagtaacaatttagtgtgtgccctgctatgccatgtttatacatatggacgtattataggctttggttttttaaagtaaataagagtatactattcatattacaacttgctgctctttttaaaaatacaccgtgtagaagagttttatttttacaagaaagttgcaaaaatagtacagagagttctcatctactcttcaccctgtttcctctattgtacatttgtcaaaaccaggagatcaaccctagcacgttactatttttttttgagacagagttttgctcctgttgcccaggctggagtgcaatggtgagatctcagcccataggaacctccacctcccaggttcaagcgattctcctgcctcagcctcctgagtagctgggattacaggcatgtgccaccacgcctggctaattttgtatttttagtagagatggggtttctccaagttggtcaggctggtctcaaactcccgacctcaggtggtctgcctgcctcggcctcccaaagtgctgggattacaggcgtgagccactgctcccggctgcacgttactattaaagaagctccacacttctttgagccatcaccagttttctccaatatttccctgctgttttagggaaccagccaggacaccacaggacattcagttgtcatgtctcttagtctcctccaatctgagatggttctttagtctatatcggatttttttttttttaggacagattttcactgtcattgcccaggctggagtgcagtggtagaggcagggtttcaccgtgttgaccaggctggtctcgaactcctgacctcagttgatccactaaccttggcctcccaaagtgctgggattataggcatgagccaccgcacctggccagtctctatcttttatgaccttgatacttttggccaattattttgtagaatgtcaatttgggtttttctgatgtatttctcatggttagaccaggggtatatgttttggggaggaagataccaggggtaaagtgccatttccatcacatcatatcagtagaacatggtattgacgtcactgacgatgctaaccttgatcaaacgccagttgtttctgaacttaatatatcagctatcccttcaggtgaacaccctgccctagtgcactctttttagcaactgcataatattccatactgttgataaaacatggttcattccagtcttccaaagttctcatatacatgtgaaaatgaggtgaaaactcagttcactgtgtggataagagtgattctcaatacgtgtgttgaactggaatgacagtgacacctctgtgtcactgcaggtgagttaaagttttggggtcccagtacagggaggcactagatagaaggtagtttcaaggaggggaggatgaatccacagaggctgacagaaccaagtggggaagcttcagaaagtgaataaataggtggaaaaaaggattgggtgataattatgacttgacttcaggtgagaaaagaaaatcattataaatggtgggatgcagggaatgctgggggaccatggaggaccatggggaggactttgggaagaaccagattaaaccccagcttgatccaggcacttcaagatcattcagtgacatctccttggctaatggggcaaatggaaaaaggagtctttggggtagggtgtggtggctcatgcctgtaatcccagctacttaggagacagaggctgagacatgagaattgcttgaacccaggaggtggcggttgcagtgagccaggatcacaccactgcaccccagcctgggcaacagagcaagactctgtctgaaaaaaaaaagaaagaaagacagaaagagaaagaaagaaagagaaaagaaaagaaaagaaaagaaaaaaagaaaaagaactttttggaagtcgggaggcctgggctctgtcttttgtcacatcatctatggaccatctctgagggcaggtgacagcccagtgaccaaactggcagccaatgcgtagggtgctccaggtgttttatcaatggtggctcctgcagaagccaagaatccaaatattttccaaaagttctttgtttcacgtggggcgctggggttcccctttccactagatgaaggcttctccccacccccactcccccttaggaaatctggagccacactgcagggtggctttgtcattgacatgccagcattccatacatgcagaaggatcactcagcttttgaaagtgaaaagttagggtcactgcaatttccccttcctttggatgtctgtggccaggagctctccacacaggccctttcttctctgcctgctctcaccctccccgtcccaagcagacagaaaccagatctctccccccacccctgaaatgaaatttcaaatcaggaacacgtgaggctttgtctaaaaggtaaccgatgtcagagagagcacattgccaattcaattattctccttcctgctggagaccgcagcttatttcaagcctaatgatggcattttgggctcacatgctaatttcatagctgtttcctggggaggagggagagttagccggcctttctgatggtcatatccattgacggtggtgttttgctgcttcctgagccggttctgcagaacttcggccctcaaacaataatactctggtttcttaaaatgatgataaatggttagattaggtcgctccacatatggcaacaagacttgatggagacagcccagtgcctgagcgcttcctgacagcagcatccacactccttggagtatcacctctcaccccacctgttgggagggaactggctgtgttgctttcagagaatgtgataattattgtaaacccagaaagtctgaggtctcagttaacttagaaagtttattttgccaaggttgaggatgcacctgtgacctagcctcaggaagtcctgatgacatgtgcccaaggtggtcggggcacagcttggctttatacattttagggagacatgagatgccaatcaatatatgtaagaagtacattggttctgtccagaaaggtgggggcaactcgaagcagggagggggcttccaggtcacaggtaggtgagagacaaatggttgcattcttttgagtttctaatgagcctttccaaaggaggcaatcagatatgcatctatctcagtgagcagacgggtgactttggatagaatgggaggcaggtttgccctgagcagtttccagcttgacttttccctttagcttagtgattttgggggcccaagattttcctttcatattataaagctggaaagtcactttctcttttcttcttttttttttttttcaaattgagctgaaattcacatcacataaaactaaccattttaaagtggacaattcaatgacatttaggacagttacaatgttgtaaccaccacctgtacctagttccagaacattttcatcaccccaaagggaaaccccatatccattgagcagtcactccccatcccccctcttcccagcccatggcaaccaccaatttgctttctgtctctatggatttacctattctggatatttcacatgaatggagtcaggcactacgtggccttttatgtctggctgcttttactctgcatcgtttttgaggttcatccatgttgtagcctgtgtcagtgagagaggagaaaaaggaaccagtcaggcaggcagttagggtgggtcctcggttgaattctttcaaaccaaagaacagcctgaaaaatcaagctgcaggcacagatgagggaacttgcacagggggacttgcctaagatgcccacagctgcacagataagattacacaggtgacttgcccagacaggcccacagtggaaaattccatcccctgacacatgtgcagtaaggggagcgaagcaatatggagtaactcaagctaagggcctgcgtgcgcattaggaggacagggtggagctgccaggaattcatgccttatgcaaaggaggcacccagccctcatcggttttgtataaaaaaaaagtagactttgcagtctactgtaaaaacggcaaccctctttcaggcctgctgtctgcagcagagagctttcctcttttgcttattaaactttagcatgaatgtcacccttggtgtccacattccttaattttcacaagacaaagaactgcagatgatacctcaaacaacgacagactgctacattgcggtgcattggcaagacggtaacattagtgcttcattcattttgatagctgaatcatagtccactctgcagagatcacattgatcacattttgtttacccacgtatccttttaaaaaaatgttttcgtggaaatgaggtctcacgatgttgcccagcctggtctcaaactcctggcctcaagtaatcctgccctgcttggcctcccaaagcactgggattacacgcgtgagccaccgcaccaggcctaaccatttatccattgatgggcatttgagttgtttctaccttttggcttttatgaataaagctgctataaacctttatgtacacatcttttagaggagtgagtgatttttgaaacaaagggtcaagaggaccactgtctccccaggaaacgtttccatgctcttttcttcctggcatctttacacaccaattctctgcattgcttccatgcacggccattaactggattactggggattcctaaataatgatgacgatgccgtgaaccagcctcatatatgatctctgctgcctgccaccaccatccatgcctaataaagtattccagtgctaataaagtgcctacttccagtgcctaataaagtatttcatccatgcctaatggagtgttgcagtgctaggaagatgcttggaatgtcacagaggtgggaatagcttaaaagcaagcaaataattattgttaggcttaagtgaaactccgggctcggccacttacttgctaggtagtagcctcaggtgagtcagtgaacaacttctccaagctgttaatgggtatttgcaaaccaaacactaaagataacacccacctcccagcattcctgggaggggccagtgaggtgaggaatagaggatactgagtcagatgctcggcacagggtgacagcctatcacagaggggacttttcttattctgaattttttttttttttgagacagagttttgcttgcctgggctggagtgcaatggtgcgatctcagctcaccgcaacctctgcctcccgctttcaggcgattctcctgcctcagcctcctgaatagctgggattacaggtgtgtgccactatgcccagctaattttgtatttttagtagagacggggtttctccatgttggtcaggctgatcttgaactcctgacctcaggtgatccacccgcctcggcctcccaaagtgctgggattacaggcatgagccacagcgcctggcctctgattttttaaaacaatggtaggtttggtgttaggctctgtgcatactgattcagggctagccaggagattttgcaaacgtgattttgcagtctaggatgtaggactgattacagggtgatgttgttagatatttgggaattatttgaggtgttctgtgtcttgagagttcaactgtccttttttggagcaatgtagccgtatttttgcaaggggaagaagacaaaagactggcttgagttcttgctcatctctctggatctttctctctgtcatctttctggctctctccctctctctttcagacccacttctgaatcaggctaaactttgtgtgaccccatactgcttatatgtgacaccagtcttttctaaacacaggctgaattcaaaatttgttacagaaacacccagaacgtctgcacgtggttatctctgaattgaatcgagccaggaatttgggcccttttttgtcttaaccttatcattattggcactcgatcagacacagactggcaaggcaaagctttgtctgtcaaggcgaaagaccaaagggctgggaaaagatgaatttcacatgttttgcatttagaacaggtagtttccctagccggcaaagaagctgagtgtgaacttgttggtgtgaggactctttgttggtgtgatgacaactcttaggtgagaatgtgtcaagaaagaagctgataaaggcagaagatgttggttttccatctaacagtcatgttcccttctcccatgtcttacttactctaccaagtaagtggcagagccaggagtctaacaatatttgcttgctttaaagcgattcccacctccgtgacattccaagcatcttcctagcattggaatattttactaggcatggatggtggtggcaggcagcaaagatcacgtaagaggctgtttctttccttctttttttttttttttcgagacagagttttgctcttgttgcccaggctggagtgcagtggcgcgatctcggctcaccgcaacctctacctcctgggttcaagtgatcctcctgcctcagcttcctgagtagctggaattacaggcgcatgccaccatgcccagctaattttatatttttatttatattttaaatttgattttatattccttgtttaggaatccccagtaatccagttaatggccgtgcatggaggcaatgaagataactggtgtgtaaagatgccaggaagaaaagagcatggaaccatttcctggagagatagtggttttcttgaccctttgtttcaaatttggattggttgaaattgttgacaaaaaagccaaacagtaaaatgtttaaagaggtttattctgagctagtatgagtgaccatggcctgaggaacagtctcgagatcctgagaaaatgtgtcctacgcggacaggttgtagcttcgtcttatacattttagggagacagaagttacaggcaaagacataagtcaatacgtggaaggtatatatttatttgccccaaaaaggtgggaatctcaaagtgggggggaggctggttacaggtcacaggtggattaaaagattttctgactggcaattggttgaaaaagttaagctttgtctgcagacttgaggtaaatgcttgagttaagataagaggggttgcagaagccaaggttcttgttatgtagatgaaacctccagatgcagccttagggagaatacggtaaatatctcttttcagaccttaaaggtgtcaaactgtcatttaatctcttctacatctgggtgagacctagaaaaggaagaagattcccttcagttgcaaatttctcccacaaaagacaactttggggctgggcgcgcggtggctcacgcctgtaatcccagcactttgggaggccgaggtgggtggatcacgaggtcaggagtttgagaccatcgtgaccaagatggtgaaaccctgtctctactaaaaaatgcaaaaaaattagcgggttgtggtggtgggcacctatagtcccagctacttgggaggctgaggcaggaaaatcacttgaactcaggaggtggaggttgcagtgacctgagatcgtgccactgcactgcagcctgggcaacagagcaagagtctgtctcaaaaaaaaaaaaaaaaaaaaaaaaaagacgactttgaagggtcatttcaaaatatgtcaagaaatagattttggggtaaacaattttgatttccctcagggtctgctatctgtcacgtgatgttatattagagtcaggttagaatttggtatcttatggccacaatgaagtcttctgtcaactttatgatccctatttcattatttttattttattttattttattttattttattttattgagacagaatctcgctctgttgcccaggctggaatgcagtggcgcgatctcagctcactgcaacctccacctcctgggttcaagtgatcctcctgcctcagcttcctgagtagctgggattacaggtgcatgccaccatgcctggctaattttatatttttagtatagatggggtttcaccatgttggtcaggctggtctcgaactcctgactttgtgatccacctgcctcggcctcccaaagtgctgggattacaggcatgagccactgcgtccggcctatgatctctattttaatgttaatgctggtcagctgtgcctaaactccaacacggagggggaataatgaggtgtatctgacctcccttcctgtcatggttgggaattcattttttcaggtttcccttggcccagagtgggtctgctcaattggttgggggtgcttaggatgttatttttagtttccaaagcaaacatatggtcccactctgtttgcctgtttttggcttaggtaggaacatgtgacccagttgcagccaatgagatgtcaggagaagttggctgggggcttctgggaaatggttcttagctcctagaaagagatacaaggaagagatggccgccttctcaccttgggatgttgcatgtggatgtttgcctggagctgtggcagctgtgttgatgctgtgaagagagacatgaagatggcagtgaagacagaaagaactggagtcctcgatgtcataattgagctgcagaattaaccacccctcgagctgccctacctctgaatgccttgtaaagggagaggataaatgtctttatcattgaagcaccttttgttgtgtttattatttgcaaccaagcagatcctgactgttagaatgcttgatgctccatttcatgcagctacgagaaaagggtgggacagctggtcagccagctgagtctagggagaatcctgtgcttattaacccattgctgcctgcctcattggcctgtgcctataaaacgagagatgctgcttcctttttaggtccacatcatgatagcacacgccttcaccagcctctgaaggaaatgagaatctttacaacaatcccgtggggagtttcgagagggccccttacagaaacggtggaacaggaagcactcagtctcttttcttcaaagcttctcatctgaatgaggctgctctctccctctgcctcatgtgttaaatggggatagcattaggggaagtttgcatctgtaggccattttggaggagtgacctagtgactgcaaaacgcttagaacagtgcctagcacgtaataaacactcagcaaatgtggctgctgttataattactttttttgtttgttttgttttgttttgagatggagtttggctcttgttgctcaggctgcggtgcaatggcacgatctcagctcactgcaacccccgcctcccaggttcaagcgattcttgtgcctcagcctctcgagtagctgggattattataggcacccaccaccatgcctggctaattttttaaatttttactagagacggagttttaccatgttggccaggctggtctcgaacttctgacctcaggtgatccacccaccttggcctccgaaagtgctgggattacaggcatgagccatcatgcccagcccgttgtaactaattattcttctctttgtcttagacagggatgtatttggccttaaatggcacacagtctgcaatgcttgagggatgtcccctaagaggactaaagaactgacaaaggagaagaaggaaataatgggacaggaggaagcaacagtgagaagaggaggggagtgggcaggaggaaataaggacaggaagaaaaagaggccaatgtaggggagagaggggcagctggtccctggagccgtctatgtccctggtttgcagagaacattcccaagggagtcgtgttcctgttgctcattaattccctggtcaactggccccttgtcgggctcttgcctggagcagttgagtgtcctctaactgggagcagctgaaacttaaagggttttgcaccgtatgttgtttccggagctccctttttcctgtggcttctgtttttcttattaaatgctgctgctgaatttgcagctgaaagaaagacagaaagactactgaagaaggccttgccgccctaaaagcttcagtggagcagtgggtctccacgctcggaggtgctttctggctgtccagtttacaaatgaactggcaaggcaagctagacctttcatccaagaatccagattaatgttgcctccgagtgtttgaaggagccacaaggtctgacttacgcatggctctttcttcctggcagaacctgataggtctgtttctgttgttatatctggggagcttctcaccaggaagggacaagcttgtaaaaaacttggtgagtttatgtctggtcggcagtcgcaggaatactggaccagttgagggaggttctgggacccctacatctttccactgcttcctgagccagagagtgtaaggggagaggaaagaattcgctcttctctgctgaagtccggaagctgtaatggggtaacagccagaaccaggggagccagactagaggcttggattttctgcttatgagtgcaccccccaaacatccagaactccgtgggcctcccagggttgaagcaacaagccacaggtccagcacttggctttgggacccccggtctcagcagtggctgtgtgtccacccatacgtttgttactcagcatcactgtggccactgctgactgatacttatgaggtgctcaaaagtcactgacaaagcagctgcctgagctcaccttgtcctcatcaccttttctcctttccaggccgcacttggtgagagtcttcacggaccacagtgttgcacgaggtgattgtgtttgcagaggtttttttgtccttgaagagcacttagggctggagagcaagacacatgctgacgagcagaagctgacaggcttgctgccatgtgggaaagtccttggacgagttgtctgcttgcggagaggtgtctgcggctcaggtagggtgtcccagctcggtgggtctctgggttccagagttccagagtttatttggtgaaacacagcaggggttatcactgtggcccatggcagggctgagctgccaacttgatgcccgttgttaggaacagatgtgaattgtgtgtccgggtgaataagcctcactgtggagcctccatgctgtagagaactggaggagccaggtttgcagagtctgcaaggcgatcgtgtctatgcgaggagaaatccctcactcggagggattgcattccaagagggctgggaagtgaagcccagtcttcgtgacttctcttttcagacccaggaaacatgggttctgtgttccctaaaagtacctggtagaccatttatcacgtgagacctagttatttgtctactatatgccaggcactagaagtaaaatgatgatgaagtcatggaccctgagttgagagagcttgatggctaatgagagaggtgattacaatacagcatgacgaatgagataacaggaataagaggaggctcatgcggcctaagcatgatggctggagggagtcttttcccaggagacaagggggccgttgcaagaggaggccagatggggaggggaggggcgcggcaggcagagggaacagccctgctgaagacaggcaggctggagaaaactccatgtgctgtggacctgggagtaattaatttcccctgaaagcagaggggggctgtttttcatgcttatttgtattgtatatttcatcttttgtaaagttcccattgtgttttaaaatttccctttgggttttaaaaatgcctgcacacattctttgatactcttcccttcaaagaaaggagtgtgggttggatttaacggccaggttctaatgaatgaagttaagtggaagtgcctgtgtgtgactttggagacgaggcagtgggcagtgaactaactctctctctgtctctgtctctgtctctctctgtcatttgccctggaggaagtgagttgccatgtggagaggtccacatggtgagagactgagatctccagccaacaaccagggaggagctgaggctctcactaacagcagaaggtgtgaccttggaggcccaggcaggccttttagtggccacaaccctaggttacctcctgactgcatgaggcaccctgaattagaccctccctagttaagctgctcctggattcctgaccttcagacagtgtgagataatacatgtttgttgtttaagctgctgagttttgggataacttgttacgcagcagtaggtaactaatacaccagtccacattccctgctcactttgtttgagggagtgtttgtctttaatttatttttggaagttctttatatattaaattatgaacccttggtatatatatatgttgtaaaaattttcccattgtaatcttgtatatactttaaaaaacatatatatgtatactttttaaaaacccaaataccatttattatattttctgcctttggtgacatttagatatgtattaggttgaaattgctaatattcaattgttattgactggcaagaaattagacctaatagtccccactacaaaatcacgtatattttttccctgtatttttctctccacacttttatggttttattttgatattaaaatttaagaccatttgttgcaggacaggtgagcaccaaaactggggcttagcctgggaggattcttggctttgcccaggaaagaattgaagggcgatctggtggtgttagacagcaatattttattcaatggtatttctccttgtggagcagggctaactcataggtagtgtgcccagaatcagcagcctatgggctcctggaaactgtgtttatacccactttcaataacatgcaaattaaggggcaggttaatgcaaattgaggggtagattatttagaactttctagaaaggagcagtaacttccgggtcattgtcatggaaaggagtgataacttctgggtcgtcgccatggcatttgtaaactgttacggggctggtgggagtgtcctaggttaatgagcactgagggcagccagggatcactttcatagccatccgcttgttcctgcctgtttctttactttattctgtctgaaccagattctgtctcagtcaacagggttgtgaccagaaaataagtcctgctggtttcctacctcaccttgacttgtctttggcttcttccttcacttgcttcttaaatgatgctatctcccgaccataatctatttctatcccctcttcatattctccttgagcaaccgtgtgcagcccacacatctgctccctcctgtgatgatggctccagcttcacttcccagcctggacacactctccagggtgggctaggcatctccacttgggtgccgggagacattgtaaattccacatctcaccctcaaaaatgttctcacattcccatttcttagcaaacagcatccctagacatgcagatcccaaatccaaaaatcctacacccagtctttcaccagctgtcacaggccaccaattaactcttctctgaagtgtccccagcaccctgactcccctatctgtcaacatgaccacttcccaagttgaattcttccatgtttttctccagaacaacagccaaggcatcctaagaggtcttcctgcctcagttctgattcatatggagtgatctttctagacccccaaatggatgctgttaactctacatcattccatggtttcacattcctggcaggacaatctccaaggttcctggcttcccataaaggcacagccaccctgaagccaaccatattggcctccttttggtttcccaaatgtaccacactcctcctggccttggtgtttgtcacacagtcctctcttctgggagtcccttccccttctctgcctgtcaacatggccacttcccaggttaaattctaccacatttttctccagaacaacagccttcaaaactcagcaggagcatcctctcctcctgcaatgccaagccaacacttctctgcttccacgacctgcccccactcctccattacagcattcacatctcatgggactggctggccacgtgtctggctcctctcggagctgcagcttcgctgaaagctgggaaagggttatgttctgcagatgcctctttcatgaattatggagcaagtaagcactgggaggctgccaagcggggttctcatttctgctgcgtgacgttgtgcaagtcacttctcagggtctcaacacatttcacaaagttccatgtttttgttgttgttgttgttgtgagatggagtttcgctcttgttgcccaggctggggtgcaatggtgctatcttggctcaccacaaccgccgcctcctgggttcaagcaattctcctgcctcagccgcccaagtagctgggattacaggcatgcaccaccacgcctggctaattttgtatttttagcagagacagggttacaccatgttggtcaggctggtcttgaacttcccacctcaggtgattcacctgcctcggcctcccaaactgctgggattacaggcgtgagccaccgcgcctggcctaacttccatgttattaaggaaaaaaaggtagaaataaaaaacatgcctaaagaataaaacaaaaggcaaaaaaatttctgttgtttcccctgccccaacacatacagcctaaatacttcctttctcatatgaggaaatcctatgtaaaaggaccagattagttttcagttatttgaaacatctgttgaactaaggaattttgtaccagcgaagcaatggtggtgagggagggaggatttgggagttgcctcgttctctagacaagttgggggagagaatgaggtttggccttgggtagagtgctgtggatttgttgggggaatgcagcttaggaaaggtgagtaaagccacagagcaggtgagtatgaccccaacagatgggatggttaggaatgggaggctagggacagctgcactatcttctaaataaatgtccctcaacctggggaacatgactatatgttagagcagtggtccccaacctttttagcaccagggaccggttttgtggaagacaattttttcacagactgggctggagggcgcaggaatggtttcggcatgatttaagtgcattacatgtgctgtgcacttatttctattattattacatacccattataatgtagaatcagtgggagtcctgagcttgtatccccgcaactagatggtcccatctgggggcgacaagagacagtgacagaccatcaggcattagattctcataaggagcacagaacctagatccttcgcttgtgcagttcacaatagggttctcactcctatgagaacctcacgctgctgctgatccgacaggaggtggagctaagctttgcttgctcacctgcagcttacctcttgctgtgtggcctggttcctaataggactgatacccatctgtggcccaggggttggggacccctgtgttagagagtctgaaagctctctctgagaatgttttaatctcgtctccatttcagtgagtttcagttctctcttgtgacttaaaacccaacaatgtctatttctcaccatcgtgggctcagctgtatggctcttctgttccccgtggtgtatgctgtgtctagaatgtccaagatggcagctggccctttagctgggatgaatggcaagttgggacctggacggtcatctctctctccttattgctaccttaggctttgttgtagcactgtgttctcagagtagctcaaacttctcacatggtggctgcctccaagagaagggacatggaagctgccagtcctctcaaaggccaggcccggaattcacacagcctcacttctgccagttttattggtcaaaaccagtcccaggcccgcccagatggggagtgctgcacacatcttgtgggggaggcgttgatggcagctgtctttggagacactctacctcacaatgacaatattcccaatcacttggttgagtgctttgtaaccgaggacatgtgactttggtgtccacgactgccttttcatttatgatgatatttgaaccaactaccactactttaattgctctggatgttaagcaaagaacagaggttgacttactgtgccaatggccatccctgcccagtgaggcctgaatggctgtggcacatggtgccaatgtggtttcctactcctctggtggacttagctccccacagtggggtccagaggccagcaccttatttgagctgtgagaagtgactccattccaggacaatggcatcaactaccacattatatcactgttttttaaatttaaaaaaaattttggccaggcacggtggctcatgcctgtaatcccacaactttgggaggccaaggtgggcagatcacctgaggttgggagtttgagaccagcctgaccaacatggagaaaccccgtctctactaaaaatacaaaattagccgggtgtggtggcgcatgcctgtaatcccagctacttgggaggctgaggttgcagtgagctgagatcgcgccattgtactctagcctgggcaacaagagcaaaactccatctcaggaaaaaaaaaaatttattgacaaaatggtgtagaaattcccctgtaccttcccccaacagtttccccattattgacatcttgcatttggcacgggacatttgttacaatgagtgagccactatttatacattacagtggtcccctgttatcctcaggggacatgttccaagacacccagtggatgcctgaaactgtggatgccaccaagccccatatatcgtatgttttttccatctgataactgaggcagcgactaagtgactgacaggtgggtagtgtctacagtgtggatatgctggacacggcgaaggctcatgtcctgggcaggatggcacgagatttcatgacactgtgcagcagggtgcgcggttgaaaacttgcaaattgttgatttctgaaattttccatttaatattttcaggctgctgttgatggtgggtaatgaaccacggaaagcagaactgcggataagggggaactcctgtgttactaatcgaagttcatagcttacattagggttccctcactgtttgctttctgcatacaatgggttttgacaaacgcatagtcccggagcccccatgacagtatcacatagagcagtttcacggctctgaaaatcctctgtgctccgcccactcatccctctatcaccctaaacccctggcagccattcatctttttctgtctctatagttttgccttttccagaatgtcatatagctggaatcatacggagtcttttcagattggcttctttcacttggcaatatgcatttaaggttcttctaggtccatccgtgccttgacagctcattgcttttatcactgaataatattccattgcatgggcgtatcagtttatgcgttcagctcttgaaggatatcttggttactcccaggttttagcatttatgaataaaggtgccataaacatttgtgtgtagggtttttattttttattttttgaggcagagtctcgctccatcgctcaggctggagtgcagtggcgccatctcggctcactgcaacctctgcctcccgggttcaagtgattctcctgcttcagccccccgtgtagctgggattacaggcactcaccaccacgcccggctaatttttgtattttagtagagacagggttgcaccaaccggccaggctggtctcaaactcccgacctcaggtgacctgcccgcctcagcctcccaaagtgctgggattataggcgtgagccaccgcacccagcctatatgcaggtttctgtgtagacataagctttcagatcagtttgacaaattcctaggaatatgatttttggattgtatggtaagattataattatctttggaagatgccgtcaaactgccttccaaagtggctgcaccattttgcattcccaccagcagcaatgagggttcctgctgctccacgtccttgcaacgtttggtgtgtttcagattttagccattgcgtagtggtatgtagtggtaaaaacaagtaattctttttataaattaaaaaaaaatgtagctttgtgttatttataagttggttttagatggataattgtttaagaagtctaagcatactcattcattcattcagtagatatttgttgagcacctactatgtgccagatatgttttagtagctcatgacacagcagtgaacaaagtagacccaaatccttgtcccctcgaagccgagattctagtgggagcagatgggagatctataaggtcagcaaataaaacacataggaagatgagtggggatcagagctttggagaaagagatcaagggagtgggggttatggggtactggggagggttgtgtgcaccatctcagatgggggccaggagggccctctctgggagggacatctgcatggccttagaaaggccaagacaaggagtggtgggtgtgggtggcgtgcgtgaggaccagcagcaccgccaggaggtgggagtggagggaacgaggacaccattaggaagggcagccagccgagcaactgggaggagatgggggatcacacagggcctcctggaccattgtgagaacttaagcttttgcaataagtgagatgtgagccctggcagagttttgtgcagaagagtgacaggaacaggtgaatgctttaaaaggatcatgtcgcatgttaaaatacaagctggagcatgtcactcttctgtttaaagccctgcaatggttcagcctgagatgccagtggccttgccgggggtggacagcaggggttgcattctggaggcgtccggaaagcagaaccaataggatttgctgacaaatggcacgtgtgatacaaatgacagagagaaattggggatggcttgaaaacatttgacttgaacagctggaagattggatggcgactttatacctggtttcaggtttttgtgttgtaaatcacattctctgatgcatagtttaaataaacagcttgaggtgtctttgtaggaattttaatgcctcgccatggagtccagcacattattcaagtttgatgaactctggctcaaaaagggtattcctgtgcagcaggaccatagaacttattgtccaaactggggcatctcgagtgaaaagactgctgtttctaatcacactgggacaacccatgtaaacctgggctgccccaggcaaaatgggatgtattgatggtttagtgagtgatagttcctggaaactgaaagagtgaagcaagagaaagaaagatgggagaagaagggagagaaaaaggcaaggatagacctgcccaccggtgaaggttgcggggcacgttatcaggagggacagaaagtgaaaggcgaggtttcttttgcccagggaggactggaatggcgggggccctgctgtgggtgttgagtccccaaggagctgccatcctcattttatctgggatgctctctctatcatcactccacttccagatatgtcagctccagagggcagtcaacacacaagactggacacaggagaaagagcttgggaaaaggaagtctctaatccggagccaaagagaagagcttgtaactgatcacgcatgcctgtgggtccaggcgtcatattttggaggcaggtctctttcctgagaccccgggctgtgaacaggtcagaggggtggactaagccgaatggtggttctcccaaaaatgtgtccacccagaacctgtgaatgcgactttattgggaaaaaaggtctttgcagatgtgattaggttccgtgtcttgagtagtaaacaaaacaaagtcccctgccctcagagctgatgctgtagcacagtgacatccccgatgttatgctggttagtgtgggagctgggaaagaatgtgtcccaaggaggtcctttccactcgacttgctgacagctctgatgagaactgcagggccttcctgtttctctccaagcaaaagccagagctttttccaaggtctctgtcaccacacacaccaccccattccctctctcatctcctcctctcatgcacactgccccagccacccccgcctcctcactgttcctggagccttccaaatatgctccctgccccagggccttcgcacctgctgtggccgtgcctgggacactttccccctcagcttggctaaatccctgtgatcgcttcgtgttgctgctgtaacagatgatcacaaaccgagtgcttaaaacaatgtacattcattatctcacagttctggaggccagaagtccaaaatgcatctcaccgggctaaaatcaagtcgtccacagggctgcattccttctggcgtgctgtgagaggctctattccctgaccttgtccagcatgtagaaacttcctgaattctttagctcatggctccttcctcatcttcaaagtgcacattccaacctctgattctgtcatcacttctcttctgacctgatcctcctgccacctccctcttttttttttttttttttttttgagacggagtcttgctctgttgcccaggctggagtgcagtggtgtgatctcagctcactgcaacctccacttcccgggttcaagagattcttctgcctcagcctccttagtagctgggattacaggtgtgcatgaccacacctggctactttttttttgtatttttagtagagatgggatttcaccatgttggccaggctggtcttgaactcccgacctcaggtgatccatctgtctcggcctcccaaagtgctgggattacagacgtgagccaccgtgcctggccatatctattctttattacctgcttcccgcagtaaaatgccagccccagagggcagggatcttgaccattttcctgcttccttaataggagctcagaggatctgaacaagggtgctatttattgaaagaaaacacgagagcaattagccagtgccaccaacaggcacgcctagctcagtctccagacggacgattccagaatcagacagctctgtgccgttcccctgcacacatggccttgaaagcagctggcccagtggcctcgggttccaggcttgccacagctctgctcttcctgacctccagcctggggcctggggcctttttccagtttcaaaatgatagtaaaaggaaattcaacagcactccagtgatgatggggtattttctaagacacaattttctaagtcttgatgcttccaatttctgccatatcgggagcatttggccatcttttggaagtgaaatctgttttattggtcttaatcttgttcagttgtttctccggggcctgcgcgacactgtcagggccttggaggcagctttggcaggacttctggggaaagtgcctactggtgatagaaaaaaatggggccttggtctgttggattcccaaaaatgcaggcattcccagctgctggagagcaggcactcagggccccggctgcagctgcagctggaaaaagaaaagggaaaaaaagggagaaggaggctttgagagcagcttttccgcacggttccaggaagctagattgggtatatccaaacgaggtggttcatggtaaaatcagaaaaaaagaaaaaccacaatggaaaagcaagggaaagaacagtttcttctaaagagaaacgcacagaggccatgtgagttaatcccaccctccccttcgctagttatctttttgctgggttgcataactgaggagggagaaagatcctagggctgagagttggaacacagaggttttgtttcatttttttaattaaaaaaagttttatttccataggttttttggggaaaagatggtatttggtgacatgagtcaattctttagtggcgatttgtgggattttggtgcacccatcacccaagcagtgcacactgcacccaatttgtcatcttttatccctcacccccttcccaccctttccccgagtccgcaaagtccattgtgtcattcttatgcctttgcatcctcatagcttagctcccacttatgagtgagaacataggatgtttggttttccattcctgagttacttcacttagaatgatagtctccaatcccatccaggttgctgtgaatgccattaattcattcctttctatggctgagtagcattccattgtgtatatatgccatggtttctttattcactcattgattgatgggcatttgggttggttccacaattttgcaattgcaaattgtgctgctataaacatgcgtgtgcaaatatctttttcatataatgacttcttttgctctgggtagattcccggtagtgggattgctggatcaaatggtggttctgcttttagttccttaagggatctccacactgttttccatagtggctgtactagtttcattgccatcagcagtgtagaagggaacacggaggttctttttttttttttttttttttgagacagagtcttgctctgttgcccaggctggagtgcagtggcgcgatctcggctcactgcaacctccacctcctgggttcaagcaattctcctgcctcagcctcctgagtagctgagattataggcgcccgccaccatgcccagctaatttttttgtatttttagtagagatggggtttcactatgtcggtcagggtcaggctggtcttgaacccctgacctcgtgatccacccaccttggcctcccaaagtgctgggattataggtgtgagccaccgcgcccggccaacatggaggttctaaccgaactctgccttgaacatgagctgtgtgactttgggtaaatcactcaccctttctgagtctcattttcctcatctgtacaatgaagggatagtaattattctagcttccgagactgtggggaaactcaaatgaaataacatacaatatcattaatattagagtcactattgttatgattccagttttacagatggagaaacagggctggactgttgagacccggactcccaggtcattacttctaatttccagaatccttgctggattcctcttttaaggcgacttacctaagctaaatttaatggagtctatttcggcaattgtttaaaattttgaagattcacctgaatagcagaactttcctacctaaagcaaataatatctaatttataaaaagttaacttctcaagagcagcacctctaagttcaggaggttcatgtctttataaatatgtggtttgtacttactatttggacataataaaaaaaggggttcttaactagggagaggtttgaaataatgatttcaggatgttataatacacatttggtgctttttaaaaaaaatggagtaggggagaggtttggctggaagagtaacatttcaccaccaagtggctcaattagaacctgaatgcgaattgcttctcacctcctatattcatgccttttgcaatgtgaccttgaagcttctccagtccacaaggtggcaggtattcaccaccttctgtgagttgccttagccaagagaatgagaagaaagtgatgatgtgccagtccccaaggtaggcctcaagggctgttgtttgtttccacttaatcacttgagtctctgccaccgttgtgagaacaagcctagttagacatgtggagcacaggttagccatctagcggttcctgctgaggccagcctggattagccaacatccagccaactcctagacatctgggagagcccagccaagatcaacagagcctcctaccaaccaccccagatgtgtgggtagtgaacactcactggtgtttgcctctgaacttctgcagttgtttgttttgcagtgataactgactgatacaagtaccaaggccagatgagtctcagaggagccatcgaacccaccctcctttaccaaatcccctctgggagaaatgtcctattcctggagtgttataggtgcattaaagactgtgcctgactttgagtgacacatgtgaggtgtttgggaatgtgtttggtgcagcctctgctgctgccagctggtgccctgccctgagtggctttctgggtgtggcttgggttgggctggcctggagggggaagaaccacctcatctagtttccctggactttgtgccggcttctggaggttccatatccactgagttctgcaataggaaaaatagtcatcatcatcatcatcatcatcaccatatgtatttatcaggcccttatataccaggcgtgaactggactgtttccttatgttccctcattcctttgtcacaatagtcctctgaggagggttgttacccccattttacagatgagtgtattagtccgttttcatgctgctgataaagacatacctgagactgggaagaaaaagaggtttaattggatttacagttccacatggctggggaggcctcagaatcatggtgggaggtaaaaagtacctcttacatggcagtggcaggagaaaagtgaggcagatgcaaaagcagagacccctgataaaaccatcagatctcatgagacttattcactactaccagagcagcatgggggaaaccacccccatgattccaattatctcccactgggtccctcccacagcacatgggaattatggaatacaattcaagatgagatttgggtggggacacagccaaaccatatctttccccccttggcccctccaaatctcatatcttcatatttcaaaaccaatcatgccttccaaacagtcccctaaagtcttaactcatttcagcattaacccaaaagtccacagtccaaagtctcatctgacacaaggcaagtcccttccacctatgagcctgtaaaatcaaaagcaagctagttacttcctagataaaatgggggtacaggtattggataaatacagctgttacaaatgggagaagttgggcaaaacaaaggggttacaaatctgaaatccagtggggcagtcaaattttaaagctccaaatgatctcctttgactccatgtctcacatccaggtcatgctgatacaagaggtgggttcccacagtcttgggcagctccacctctgtggctttgcagggtacagcctccctcctggctgctttcacaggctggcattgagtgtctgtggcttttccaggcacatggtgcaagctgtcggtggatctacaattctggggtctgcaggacagtggccctcttctcacagctccactaggtagtgccccagtagggactctctgtggggcctctgaccccacatttcccctgcactggcctagcagaggttctccttgagggccccacccctgcagcaagcttctgcctgggcatccaggcatttccatacatcttctgaaatctaggtggaggttcccaaacctcacttcttggcttccatgcacctgcaggatcaacaccacttggaagctgccaaggtctggggcttgcaccctctgaaaccatgagatgagctgtaccttggcccctgttagcaacagctggagcagctgggatgcagggcaccaagtccctagcctgcacacagcatggggaccctggtcctggcccacaaaaccattgttttctcctaggctctcagatctgtgatgggagaggctgccatgaaaacctctgacatgccctggagacattttcctcattgtcttggggattaacagtctgctccttgttacttatgcaaatttctgcagccagcttgaatttctcctcaaaaaatgggtttttcttttctactgcatcattagcctgcaatttttccaaacttttatgctgtttcccttttaaaatggagtgctttttttttcctttttgaaatggagtcttgctctgttgcccaggctggggagtgcagtggcgtgatcttggcttactgcaacctctgcctcccaggttcaagcgattcttctgcctcagtctcagtcccaagtagctgggactacaggtgcctgccaccatgcctggctaacttttgtatttttagcagagacaaggtttcaccatcttggccaggctggtcttgaactcctgacctcatgatctgcccgcctcggcctcccaaagtgctgggattgcaggcaagagtcactgcgcctggcctggaatgcttttaacagcactcagctcacctcttgaatgctttgctgcttagaaatttcttccaccagataccctaaataacctctctcaagttcaaagttccacaaatctctagggtaggggcaaaatgcctccagtctctttgctaaaacaaaacaagagtcagctttgttctagttcccaacaagatcctcatctccatctgagaccatctcagcctggaccttattgtttacatcactatcagcatttttgtcaaagccattcaacaagtctctaggaggttccaaactttcccacattttcctgtcttcctctgagccctccaaactgttccaacctctgtctgttactcagttccaaagttgtttccacattttcaggtatattttcagcaatgccccactctactggtactaatttactgtattagtccgttttcatgctgctgataaagacatacctgagactgggaagaaaaggaggtttaattggatttacagtaccatcatggtgggaggtgaaaggcacttcttacaaggtggtggcaagagaaaaatgaggaagatgcaaaagcagaaacccctgataaaaccatcagatctcatgagacttattcactaccacaagaacagtatgggggaaaccacccccacaattcaaattatctcctactgggtccctcccacaatatgtgagaattatgggagtacaattcaagattcaagatgagatttgggtggggacacagagccaaaccatatcaatgagcaaagtgaggctcaggaggtgacttcatttaattgcccaaagccacccagctagaaagtgccgcagtcagctttgaactcagacaatctgcttgagtgagaatcccaactccaccacagctggttgtatgatcttgggcgaggcacttcactcctccagactcagcaacctccaccaggaaacagtggtaagaatagctcctcccttattgggttgtagtgaggactgaaagaggtactacttgggaagggtttgcaacatgatctggtgttcaagaagcactctaattgtgttagctaccactatcattgttattattgttgcaatttttattactcaaggtcatgccttttctcctccagggtcaaaggtggtctcactcaaggtgagagaagggaccatgaactagtggggtttttctttttcttttttttttgagatggagtctcactctgtcacctaggctggagtgcagtggtgtgatctcagctcaccataacctccacctctcaggttcaagcgattgttgtgccttagccacccaagtagctgggattacaggtgtgcgccaccacaccctggctaatttttgtatttttagtagagacaggtttcaccatgttggccagtctggtctcgaactcccgacctcaagtgatccacccgcctcggcctcccagagtgctgggattacaggcgtgagccacctagcctggagttttttctttaatttggaggagggaggggagctttggttctgaccacagagtgtgaacaaattttggtgtctgcagcagaagtagactaaggtgacccattgtcctgggttgatgtctgtgacggaggggtttcctgggatttgagactgtcagtgctaaaactaggaaggtcctgggcaaaccaggagaaatgtgttaccctagagccgatccaacatgcctgaagctgtttccctgggcttggttctggcttccagaggttccacttacagaggtttccttataataaacataggttagattaaaagcagagaggagggagaaggcagctctcctctcaggaggaaggtgggcagtggctgctaaataacagacctcatcttaatccagggggctggattaatccaggtgtccctggacagcagcctggacctctgcacgtgtccccttattgggtcccaattttccatcgttcttggggcttcctccaggcccgctctgggcaggcaatagaactgcctcttcctgagagttctctgctgctctgatcccaagaaggaagctggggttcttgggaacctatggcctgtcacagctgccttagggatcgtgcaccttcatctctccatgtgaaggcacacaaagccctactgtttggacaggtcaggagtgccggcgcccctcctctggtttctggtcgcacacgatggcttaagcttggagactgtgctgtgcaggagacagattccgccgcctcccccactcgggtctgtttttcagccgtggctccggcagtgggtctgattttatcccgcaaagtgatgtcctgtgaccgttcgatagttccctgagtcactcaataagccagttgggccccatctccctgccctcttgcgagtgtcgggcagagccatgcttctttgtcacccctctttcaggctctcacgttcgccggctcatcttagagcttcctgaatacacgggaagctttcgcatcccacagtgttccctcttccagcctggtgcagaggctgtgtggcctgacggtcaggaacctgcgctccaggaatcttggttctgctacttagcaactgaatcgggcaagtcttttcacctccgagatctcagtttccccaactgcaaatgggaaacaagtatgttctagttatccattgctgcactaaaaaatcaccccaaaatatggtggttaaaacaatagttggttactatttctcacggttctatggtgtattagtccgttttcacactgctgatagagacatacccgagactgggcaatttacaaaagaaaaaattggacttacagttccacatggctggggcagcctcacaatcatggcagagggcaaggagtagcaagtcctgtctgacatggatggcagcagacaaagagagaatgaggaagacacaaaagcaaaaacccctgataaaaccatcagatctcatgaggctcatttactaccatgagaacagcatgggggaaccaccccatgattcaattatctcccgctgggtccctcccacaacacaggtgaattatgggaatacaattcaaggtgagatttgggtggggacacagagtcaaaccatatcacaaggtatgagtagacgaggctgtcactgttcttgctgacagtgtctcctgaggctgcagtcagatattggctggagctaaagttatctgaaggcccacctgggctggtgtccaagacggcgcacttctacagctggtggttgatgctggctgtgggctgggaactcagctggggttgttagcgtcagtgcctatacctggcctctccatgtggctggactccaagagggaatgtccccagagcaaatatttcaagggaagagaagtagaaacttctagacctcttcaaaggtaagcactgggatggcacgacatgattagtcaaaaccttcaagggggtagcatagttcccagtgttcggggggaatggcagtgtgtacagggaacggacaagtggatggcagcctcccacagaacataatatatcctggcatatatcacagaacgacacccagtccacagtgctgtggcaatgctttgaagggatatgcagggggagtgtctggcatgtaacatgcatttgtgaaatgctgcttgctcccagcattcactgttaaagaagcagaggctggaagagtcttgcatacatatatcagtctaaccaggcaggagtgaggctggcatctaggggccccatctgctgaagccaagctcttgagtgctccagagaataaccaaagacaaactcaggaacagaataataatcataatagttacagttattacatattatctaatggagaataagataactgtaataatattagtcgtaagtatatattatcttatagagaataatataactataatcataataagtattatgtattatctaatagagaataatataattataatcataatagttatatctactatatagaatatattaactattttattaattatatgctatatatactatataatatatataatatacttagctattatgtatttgttatggtttgactgtgtccccactcaaatctcatcttgaattgcagctcccacaattcccacatggtgtgggagggacctggtgggaagtaactgaatcatggcgatggtttcctccatactgttttcctggtagtgaataagtctcatgagatctgatggttttataagggagagtttccctgcacatgctctcgctttgccggccgccatgtaagatgtcactttgctcttccttcatcttctgccatgattgggaggcctccccagtcatgtggaactgtgagtccattcaatctctttcctttataaattacccagtcttaggtatgtcttcattagcagtgtgaaaacagactaatacagtattatatatactacattacatataattattgcatataatatgtatactattatatatgccatcttgtatataatgtataacactctgttattactgttgatcacccttattgcaccctcattccctttgtagagctgggaaactatacaagtaacaggaagcctctccttgcctccctgatgacaaaagcatcttctgctttgcagacctgggtggaagggtggggtggggcctgactgattaccagcagcactgggctatctcaacttaccacacaccttcagtgttgacctttaatggccgtacagcaccctgctccccagccctccacacctctgatatctcacccagcccaggcaggctgcaggttgtcaggatccatctgcactagcatcaggaggctgccttggaggcccacgtgctccagggctgatatttacaagcactcagcattggagctgcctttgttacatctaaaaaatatggtaacttctgggatggggccaaggcacagaattgctcaggtagtaactggaggacagagaaataatagtggtagagataagaaaccttgatggtaataatactgaacagatcaggaacagctgctttgccacttaatatttcacaagcattgtaatcacttcatccagtcccagcccatcttaccggtgagataatgaagtcagagagagggaataatttaccacattgacatggctaagaagtgacagcaccagacccccgatggaaatcactctaattccaaagcccctacactgaccatcctccacaaaactgtcaacctgtgcaaatacataattattgagtccaatggaattttcattatatttgtctttttcacataatattattttattaagactcattctggtccttaaatagtctttggaaacatgattttaattgctgtataatatttaaacacatgaatgtaccataacttgtttactttcctttttttggatattggattgtttctactttttttttttttttttttttttgagacaaggtattgctctgtcacccaggctgaagtgcagtggtgcagtcttggctctctgcaacctctgcctcctgggctcaagccatcctcccatctcagctcctgagtagctgggattagacgtgtgtgccaccacacgcaacttattttattttttgtagagacaagatcttgctgggttggccaggctggtctcaaactcctgggctcaagcgatcttcctgccttggcctgccaaagtgctgggattacaggcataagccactgcactctgtctattggcatcatttttatgaggttgggtgttctctggagagaccttccaatcacaggagagtctcagagatgataattgtgtcttgactgagaaaaatgagcctccacaggttccctttcctgagagaagactccccagatccagcccatgaacgcctattcccagcaagctccctccatgaaatcatagtttgctttgcacttccaaatgaacaacgccacctccccggctggctaacccataccctgtttcaaattgcttcggtttcacattccacagaggtatttcctgatgttcacttcatccagcagtgtctgtctaaccccgggattactgagaaccaagagacaaccctaaatttttcttttttttcttttttctttctttcttttttttttttttcactttcccctaaaaccccacagacttttgccacctgccttctttgaccattccattctcgctcccttcggggtattttgggagaaccatctaaagaaaagtcgtttgggattttttttggttgtcttctcagaaagtgttttgaaatccaatctgaatctcaagtatgttttgagttgtgttcaacttttaatgttctgtgaaaatttggatttaattaatttctcttgcattcggaaacagtgtgatacttttcttttttctgtttcctggaccaagaccttaccacattcatggaaaaaatgaggtggtgcggagtattttctcataagaattcatataaaatggcttggacaggcatggtggtgtgcgcctgtagtcccagccactcgggaagctgaatgggaggatcacttgagtgcaagaatttgagtccagcctgggcaacatagccagaccctgtctctaaaaaatgataataattttaaaatggattgaaattgttgcataaggggaaatgaccgatttctgaccctaaggctatgctagcagcaaactgcaggtgaatgtgattgggtgtatttcaaccccaaaggggaacttgtcatgtcatctggtgtagctgacactggtagtgacctttgtgacttcatgggccaataggccatgcatttcctttgtgtggtggagccccagccactggacttgagtctataatgctgtgtgcatgagtttcctcttgcgactgtaataaactgccacaaacttagtggcctcaaacaacacaaatgtgtcaccttatcccaagttccggagggcagaagtccaaaatgggtattatggggttgaaatcaaggcgttagcagggctgctccttctggaggctctaggagagaatttgttgttgtttgagacagggtctggctttgttgcccaggctggagtgcaatggcacgatcttggctcactgcaacttccgcctcccaggctcaagccatcctcccaccttagcctcctaagtagctgggactacaggtatgagctaccacacctggctatttttttttgtacttttagtagagatgttgtttcaccattttgcccaggctggtctcgaactcctgagctcaagcaatccacccgccttggcctcccaaagtgctgggattacaggcatgagccactacatctggcttctgggaaagaattcattccttgcctcttccagcttctagagattgccacattccttggcttccagccacatcactctgacttgggtttctgtggtcacatctccttctctgagtccgaccccctggcctccctcttataaaggccctgggactacattgggctgactcggataacccactaccatcccccacctcaagatccttcacgtgaccacatctgcagagtccctttaaccatgtgaggtcaaatgtttgcaaattctggggacatctttgggggccgttattcagcctgtccctccaggctcaggctcaccaccccaaatgccaggacatcccaacaattgcctgtcagtgttgggagaggaagtcttcccctgccatggattccagctcacaacctctcttccacagcgagtaagtgtgatctggtggtacagaggtgatacttgaggacacttctgaaatatttgcggggcaaagtgaggtgggggcatgcccagatggtggtggcatttcctgtgggaggaggccccaccggggaatttcactgtcaagagactaagagttgaacctcaacctgagtcaccagaatgccttcgggcttcagagtctccatctctaagatgtggatgagaagctgtccctggggttctcatgtgaattaatggaggtgaacgtgaatccaataaagcgcctgtcatcccagcactttgggagacccatgcagacggatcacctgagctcaggagtttgagaccagcctggccaacatggtgaaaccccatctgtactgaaaatacaaaaattagctgggtatggtagtgcatacctgtaatcccagctacttgggaagctgaagtgggaggatctcttaagcccaaggaggcggaggttgcagtgagccaagatcccaccactgcacttcagcctaggtgacagtgagaccctgtctcaaaaaaaaaaaaaaaaaaagaaataaagaaaaaaagaaaaaaaagaaagcgcctcgcctgtgtcctatgatcatgctatcgccatcagagaaccttagtattggcgtatgaagatatgaagactggggtgatattgcacacttcataatgaaagcctgaaataatcaaccttttagattctagttaaaaaaaaaagcaacaaaaacaagcaaatgaaccccctaaggaccagttaatcagaaaggaaagcccaaagattgtctacctccctttgcacctggtggggtgggcacctttgcagaaccatgcctggtgctgatagatttggtggacttgtggggccagtttcaaaagtgctgtgggaagccaggtggagaattttcaggttgctcaatggcagacacgatggtctaactccaggcaaagatctgaatcttggcgattggtttatttgatctgcctagtcatctgttcacttccttcatctcctttctcccaaatctaccctgcttgctgagctcagaaggctcggggacaaagctctggcttcggcgtcaaacacccctgcattcaaatcccagccccgttccttactagctgggtgactttgggccagttacttaacctctctgatctgagtgctaaattattgaaaatgcaaacagtcgagaaaaagtgcttatgggagtttctaggacatagagggtgatcggtgagtgctagtttctttccctcctgttgggagatatttactcagtagagtctcatgagagttgagctatggtggtacaggaaacaggtcctgttagacatattgagaatgtgtgttcccatattggcttcagggccattaatctctctaggcctccgtttcctcatttcatcagtaaaatgagaaaaaaaatggtctctctgacctcataaggatattcaagaaaataaggtagtgatctttggaaaatcaagtataatagcccattattgaagaaaaagaaaagtattcatttccaaaagctttcaggatgtacatatgttctacattctctttaaaagcatttgtttttcttgggaaaaaaatgaagcctacagcttttaatgatcaaccacaatggtcaccatccatttgagaataatacacactgatcacgtcccctggcgtgtgagctacccgcggagtactagcaagcacagacttcatggttgtcctatgtgcaactgaccttgacctctgatgctgtgcatcttggcacaaaaccaacagcttcgttttgcagagagcccatttacggggcatcctgggctggggggtgactcagtagaggaaaacgtggccacccggccagcttggaggcagccacttcagccagttccagaggaggatgtgtaagaatggtcagccccagtggaagacctttcctgcaaggtcagcggcaatgatttcatgaccggtgggcccaccctgactgcacagccgtggaaaatcctccaacagagacgggaaagagaaaagggaacccaccctacccagaaatgaggctgggctgagcacagatggtgcaggctgagaagggcactgccaagaagtacagaccgaaggagatacttccagctgccaccaagctgctgggacacgggcgtgctgtccttctggtgacaatgagagccatccgagggccacccttgggatattgtgcaaatggcaagtatttcagatggcctgtgggtgtccgagggaagggagcagtttcagggcttctgtttgagagagttatttttttttttaatggaaaaaaacaccacccgctttgcctgtggaatcatcagaagttggtgatgatgacaggaacaggatctcagaataggaaccagctggagattcatatggagaaaaacaaaggtcttgatgatttatttttctctcttctctcagcatgttagcaaaacaaacaaacaaaaggggaaaaaaagcttcaatgaactcttaagaaacaaaaatgaaaacacacagagcatctagggaatcagctttgcccttccccgctcctgcaggattggagggaactgcaatcattgtgaccactgggaatactggcctctgccataacactccaagaggcaagccctaaatggcaccaccaggcaaaatggcaggccaagtggaaaggcaggaagcggcttccactggctgcaaacgcttggctcaacaccacgggctgtttctgaccatggagagggcagcacctccagcttcgcaggggctgtgttctggggacagccacggacatctcccacctcatccctccattcatacctccctttccatagacagtcggggactctaataatccccagcaatgaacctgggccgaggtggtcatggatgggtggtggtcatcggtcattgctttgtgggatgtcaagctggaagacaggaagggtgaagacagggtagctgtgggagcgctaccctcgggggcttgctgattcttatgcactctctctggcattggaaggactttcagactgtttcaaattatctatgaataaatttccttttggatcgtcaggcaatcaggcagcagaagtggaagatgcctcctgagccagcagagcccctccagaaaaatgcctgccagacgctgggaacttggctcgaggttgggtcttcacagccaaggctttggcgtggagatcagaacggagggttctaatagcaaccaggtggatgcggaagggcacccgagagccagcatccctccaaggcagagcatcagaaaatgaaaagccctatgattgcaggaaatgatcctgcagtaggaaagacagcgaactttgcccccaagaggaaaaacatacttttgcaaaagattttctaccagaaatggaagtaaattacagaaagctgtcttgtgttcacaataaaattcaaggacatgtgaccttaaaatgagataaacttagatgcaaagacacaggattgcaatgaaaaggagacatggcaaagatgaaggcagaaacagccagggagctccgtgtgtctaggaaggccctgaggaaatacacctgaaaaacggacggcggcattcgcagcagaaacaagtgaaacagtagaaaattgaatcaatgatgtccagaaatgagggggaactattgtttgccaaacaagagccatgttcccacctcaacattttccaggctaacggaatccttatcttcctcagagtcctgagcccttctagggggcgggcgctggcccctctttggccccaggatgtgaatctctgttgcttaagtcaaccacgatgctctcattcgccttcagcaatgaccctcttaggcctggtcataggatgcccagccagcccaggactcatgaggtggcctctgcaggaggacatgtggagaagggtctcctcaccaggaggaggaagcacgtggaggaagtggtttttttctgagacattatcttacctgcacacaatgcctgtaactatgtcctccctctatccaccaaagacggcagagaagaaagagggaaggaacctggatttaagctatgatgttactgagttagccagtcctggagttttctacctctgccccccttgttatgagacacaatgaatattcctactgttttagtcacttgcaggagggtgtcctgctgtacgtagctaaaaataccctatctaccagctgggtgtggtggtgcatgcctgtagttcgtttctcaggaggctgtggcaggaggatcacttgaacccaggagttcgagaccagcctgagtggcatagcgagactcgagtccctaaaaaataaaaagtgccacatgcctgcctgtagcctgtagtcccagctatgtcggaggtcaaggcaggaggatcacttcagcctaggagtttgaggctgcaatgctctatgattgtgacattgtactccagcctggatgacagagggagcccgtttctaaaaaaaaaaaaaaagaaaagaaaagaaaagaaaagaaagaatagagaaaataccctatctaggataagtttaagcagctctcctagaatgcagaaggagagaaaacaaaaagagatggtgataagacaagaatgagaaaaatgggaaccaaacaatgggcgacatcctgaagaagaaaccagaacaaacccagacaggcacgatagaagctgcgaaaggaatgtgggtctgcaaactgaaaataatgcctggctgtgggtcacactcggacgaatccgtgtgaagacagtaacacactgggcagaaaggcaaaggatatggacagaattcacaggaaaatactgttcaaatggcccttacgtttatcagcagatccctggccttcctcctaatagaattgaagatcgaaactagaccctgttaccatttccactgcctgtcaagctggtaaatgtgcaagttagagagaatgctgtgggtcctaagctggggcaccaaggatgctggcccattgctggtaggaacgtcagggcttcaaccgcacctgggggcaatttgttaacataacaaatgcacacaccccttctaggaatttatcctacagtgatatgcacaggtgtgaaataacacttggacaaggttacatagtgaagcttactcctaatagcagaatattggaaacaacctgaagtccattcataaattatgatccatcaaaaactagacaacatttaatatcctggcatagaaacatctccaagatggagtgttaaacataaaaggcaagatgtgaatagcatactgccatttgtgaagaaaggaggaatcaatcaatatatctatttatcgatcaattatctatcaattatctatcaatctattatctacttatctattgattaatttttttcttttttatttttttgagacagagtcttgctctgtcacccccagctgaagtgcagtggcgcgatctcggctcactgcaacctccaccttccaagttcaagcgattcttgtgcctcagcctcctgagtagctgggactaaggtgtgtgccatcatgcccagctaatgtatttttgtagagacagggtttcaccatgttggccaggctggtcttgaactcctggcctgaagtgacccactcaccttggcctcccaaagtgctgggattacaggcgtgagccactgagcttggccctgattgattttttgactttctattatctatctatctatctatctatctatctatctatctatctatctatctatcttatccatctgtctatctatgcatctatcaatcatctatccatctctttgcttgttgttaaggactgaatagtgtccccctcgaattcatatgttaaagccctaaccccaatgtgactatatttggagataaggcttttaaggaggtaactgaggctagataaggtcatgaggtgggtcccggatccagtatggctggtgtcctcacaagaagaggcaccagggatgtgtgcacacagaagaaaaggctgtgtgagggcccagcaagaaggtggtcatctgcaaggcaaggagagaggtcttggggaacacccaactgccaacgccttgatcctagacttccagcttctagaactgtgataaaattaatttctattgtttaaggcacgcattctgtggtatattgtaatggcagccctgacaaacacagattttgataccaagaagtggggtgctgctgttaacaaatacctaaaagtgtggatgtggctttggaattgagtaaaaggtggaggaggaagatttttgaggtgcatgttagaaaaagcctggattgccttgaagagactgttggtagaagcatggatgtgaaaggtgattctggtgagggctccgatgggaaggaggaacatgttattggaactggaagaaaggtgacccttgttataaagtggaaaagaacgtggctggattgtattctggtgtttgtggagaaaggagaagttaaacatgatgaacttggataagaaatttctttttttttttttttttgaggtggagtctcaccctgtcacccaggctggagtgcaatggtgtgatctcggctcactgcaacctctgcctcctgtgttcaagagattcttctgccttagcctctggagtagctgggattacaggcacgtgccaccatgcccggctactttttggatcttcagtagagacggggtttcaccatgttggccaggctggtctcaaactcctgacctcgtgatccacctgcctcggcctcccaaagtgctgggattacaggtgtgagccactgcacccagccttagctgtagaaatttctaagcaaagtgttgaaggtgtggcctagtttctccttaatgcttattgcaaaatgtgagagaacagagaaatataaactgaaggaattttaagcaagaaggaactagaccttgaagatttggaaaattctcagcctatttatatttcaaaaagtgaggaagcaggttctggagagaacagcaagggtgtggctggaaattcattttatacagatattgtgggtgcgatgtgtggatttaatcagtcatttcagcagaagttagccatagagatgggattataccagcagagacactgccaggcctggaccaatggggacagagacaggacatagtgtcccgtggagatggatgtcctggaatttgacaggacagtagagttattcatctgtgaacatgcactatcctttaagaaaagaggaggacgctggaggcaactcagaggttggcagggctggcactgccaccacagacaagggaacaaagctgtgtccttcttagtttcaaagggtcagactgttgctcagagccttgggggtggggccactgcctcgggccatggcgcccggactacaggctactgccccagtgggcctggaaagcaggatgctgagctgaagaggattattcttgaggcttaagagcaaatggaatttgcctcgctagattttggacttgcttgggacctatcacccctttcttctttccgatgtctcctttttggaatgggaatgtctatcccatgttggtcccaccactgtgtcttggaagcacataacttgtctggtttcacgggttcacagccggagaggaattttgcctcaggatgaatcatgtgttaagcctcacccatacctaatttagatattcagacgagactgcacctagagttgacgctggaatgcgttaagacttttggggctattggaattgaatgtaatttgcatgtgagaaggatatgaatttgggggaccagagggtgaattattacagactgaattgtgtccctcctccaaattcatatgttgacgccctaacccgtcatgggactgtatttggaggtagaacctttgaggaagtaattaagggtaaatcaggttgtaagagagggtccctaacccagtacagctgatgttcttattaggcgagagagagagaccagggatgtgtgtgcacctaggaaaggccacgtgaggaccctgtgagaaggcccccatctgcaagccaaggagagcagcctcaagagaaaccagacctggtgccatcttgattgtggacttccagcctccagaactgggagaagtaaattgctgtcgtttaagcgagaacagagattgcaggtgagaaggtgaactgggtatctggggactgggaaagaatttctgagtaatttctcagtagatctgtttttatcctccctttatattaaaaaatttaaaaataacagtgataaaacttagaaactattttttcttttttctttttttttctttttgagatagagtctcactctgttgcccaggctggagtgcagtggtgtgatctcggctcactgcaacctccatctcctgagttcaagcgattctcctgcctcagcctcccgagtagctgggactacaggcgcccgccaccacacccggctaatttttatttttttagtagagaccgggtttcgctgtgttggccaggcttgtcttgaactcctaacctcaagtgatctacccaccttggcctctcaaaagtgctgggattacagtcatgcaccactgcacccggcctaatattttttatttatatgacaatttattgtaagagtagcggtcagcatcatattaaatgatgaagccatggagacattcccattaaaaattagaaacaagacaagagtgcctgttatcactgcattgctgaatgttgttctggttaagccacataagccaatgtaataagacatggatattagaggccaggcgcggtggctcacgcttgtaatcccagcactttgggaggccgaggtgggcagatcatgaggtcaggagtttgagaccagcctggccaacatagtgaaaccccgtctctactaaaaatacaaaaattagctgggcgtggtggtggacgcctgtaatcccagctactcaggaggctgaagcaggagaacctcagcttgaacccgggaggcagaggttgcagtgagccgagattgtgccactgcactgcagcctgggcaacagagctagactccatctcaaaaaaaaaaaaaaaaagacatggatattagaaagaggataaagtgattgaaaagaagatgggcttattattatttacagatgagagtgttttctactatgattgctttgctatttggtggttatgacacattttatatattttttgagatttggatcattttttaggggcatcttctatcatttgtttataagcacagatatagggaggtggatacaggcaacatttaaacttaagtggctctgaaatgtattttacattaattgcaaaaatccttacttggagaatttttaaacggcgacataaggaggccatatttatttaaatgagaatgttgaggtgaaaggcaaactcataggaggctgggtggtgagaaggatggaaggaggcctttttgggccgctcatctgtgaattctcccacctctagaggctttcagcaagctgaaacccaactagtacatggaaggtaattggctgtaattaattccacaaccctgggcctcttgcaaggcctcctgggtaaacaaaagcaaaaacacattgcagcaaacccctccccgctgcctaactctggatacatgagactagagtccttttgaccgtgccctgccaactgccaaaaacccgtcgacaggctgggtcctaaaggaccctcgggaagccctcgccctggggagggagcaccgaggccggctctttgcagttgctgtgtttttgctttccgcaggcccagctatgtaagccccactgggtcccagttggccaagttgcttttgttccttctttattctgtttctagtagtacaaagcagtttcagctgcttaccctcatgggccatgagctgctggaagagggtggcagtgtggggagggggtgccccttagaatcgctctacttctgagtccccaccctgcccaatcagaccccacaagcggctgaccccaagagacggcactcaggggccttctcgctgcagttcgtctttgcatcctctctcccataattcattctacacacagtagccggaatgatctttcagaaacataaatcacatcaacccctgtttaaacacagccccacccccgcccctcccccggctttcttttgctcttagtatcaaatccaaacgccattctcaggttccccaggaccctcctgatcttcccctgcctacctcttcaagttaatctagcatccctctctctggacccactggccttgctgttccttgaatacaccatgcttgtcccttcacttcctggtctctttgtctggaagatccacccccagggctctacagggcttgctctttcttatccttaaaatctcagctttgaaccttccctgagttctctaccactggcagaccccttccagcttgttctctccctgcagccttttaccttatttgttggtttgcatattatttcctgtatctccctaccccatccctaaccctgaagaagaggccacttcccttccatgagggcagagactctgtcttatcactgctgtgctttgcacagagtagggaacaaaaaacacacattcaattattttagttgattatttaaggagaaacatatgcctgaggactgagtttatcagaacaaaatctaaacagaggtggtttacttcaaaggccaggaactgaagcttcagcgtcctcacccgaatagccacctccaaggccctggatctaattttgcacttgtaattttgtacttttttttttcttttaaagaactcccctgaaactgcgtaagcttcagatgccccaaaacctggatctactctggccaccaaagatgggttagtggtcagatgccacgctgggtagcaaataatggtgatcatcgtaataaacaataacaataaataacagccgcctggtaggaataatagtaacaatcatagcaggagcggttacttagcaagctccgtgcttgtgctaccagccactctgcaatgctacacccattttcaagatgaggaaacagaggctcgatgggtagcgaggctcgccaagcaagcttgggcctgtctgctgcttgaactcatgctcacggccgtggcttagtttgcatcagatagcccagaaagtggctgagtgacctgtagaaagtgtttcttgggctgggcgcgttggctcacgcctgtaatcccagcactgtgggaggccgaggagggcagatcacgaggtcaggagatggagaccatcctggctaacacggtaaaaccccgtctctactaaaaatacaaaaaattagccgggcgtgatggtgggtgcctgtagtcccagctacttgaggaggctgaggcaggagaatcgcttgaacccaggaggcggagcttgcagtgagccgagattgtgccactgcactccagcctgggtgacagagggagactcagtctcaaaaaaaaaggaaagtgtttcttttcaggcccctgactcctatgggctgagcagaattttgcagaggggccccagccctgtccattgagggactcttggcccctctcctttctggtgaccctgactcgtaccccatgaagctggacgtgggcagtggtggagttccagccctcacccctattctgcagctagttccagtacagccggtcctcactattcgtggttgctgtgtttgcgaatttgcctgctcaccgaaatgcatctataactccaaatccagtactcacgacaccttggccgtcacttgatgcgtgccgagtagcgagcaacgtgtctcccgacacacatgctctcagctgaggttgcacagggcagtgctctgcctcctggcgtcagctcacacacccctgacaagtgcccttttcagtctgtttggtgtcatgctttttgcacttgtgtgcttcttgttggttttgctgtttgcgacaacatccttgtggagcggtgaagggcgggtctggtgtttctgagctgtggggtgcctgatagagaagatgcgggtgttacggacacttcgttcagcctgagtcagagaggctttggctatgggatgtgcatgtggatgaagcaacattggacattaaacaaggtgtcttcaaacaacacacacataaagcaaggttatgcattgatcggtggatgaaatattgtgcctagaggcctgcaggaacctaaccctgtattttccctgagagcaagggttcagcatttgtgaattcagtgttcgcagggacctcataaaacataactcctgcgaatagcaaggactgctttatctcttttctgaccccaaactggattcaagtaggtgctctgcaagcctgttctgcagcttctttcacttctgaattccccgcaccctccatgttgggtgcccattgctgtctgtgcagtggagttttgccaaccacgggtgcccacagatatccacggcctttgggcaaacctgtcaagagtgtgtgccatggcttctggaatgcactggaatattccctggctgcatgctgtgcttctttctgcggggctgtgtgttacccactccataagagggaaacagctcagtaacatccctacagcccatcctgggctattcagagccccaccgagccaaggtgctggcactggttgtaccctacgcctgagttattctttgccatgttgattgcaggccactttatacaaagatcgcgactaggacaatttctaaaaagattgaggccaggcgcagtgctcacacctgtaatcccagcactttgggaggccgaggcgggtggatcacctgaggtcaggagttcaagaccagcttgaccaccatggagaaaccccatctctcctaaaaaaatacaaaaattagccagggttggtgtcacatgcctgtaatcccagctacgcgggaggctgcagcaggagaatcgcttgaacctgggaggcagaggttgcagtgagccgagatcatgccattgcactccagcctggtcaacaagagcgaaattccatctcaaaaaaaaaaaaaagaaaaaagattgagacttaaaatgggaccctactgttttgaatcaaattccctttaaaaacatagactcaatttctttcccttcgtcctccctgcccctgccccaggtctggaaccattctcccccatccctccccggaccccagcctgcttcatcacacatcgggattggccgttcaaattctccttttacaggacgtgtgctgcaccgaagggcttaacattccctccttgttttcagtgggctggggtgtgcaggggtccccgggtgggagcaggaggctgaggagagcctgctgcggcaatgaaagcaccaggttcctcctctttctcaggcgcggcccctcctctgccaggctgtgcaagccagttccgcctgtttacaagcagaggttggctgcctgcaacctttctagaggtgggagcaagccagggggcttatcaaaaactggggagggggaacatggtgcagggagagttggggaggaggtagaaggagggggtgacaccatccgggagcctgagcttccatctgtccttgcacaaaaggacctgagcattcagtgtgtgtgcgtgtgcacacgtgagcatgtgtgagcagccgttgggagccatggaggagagggggtgtggcagattaagggagttcagccacagaaaagaaagttgataaccaaagaattttgtttggattcttacaggcagagcaagaaaagtaccattttgtgtggacgctatcttcctaatataaaacagaaacccaggggtctggtttcgtaggcagtgggttgggccaaggcctgtgcaagatatgggttttccagaaactgaagttataaggaaagatgaaatagttctccccggtgcttcctctccccagactccagggcaccgtggcgtggtgtggcctggagttttttcgtgaggtcgatccttctggacggttctttgccactcaggctaaaatcagatccagagctggcctcagtggctgataaatcttcttcccacatctgcttgggttgacacaacttggagatcctttgggaagagaatatgtgggagattggagaactttgaatgtggactgtgtattagatgatattagagaggctagagagaaagacagagacagagagggagggagggagggagaataaacagcaagatgttaacaattgttgactctgggtggcgcgtgtagttgtacgtgtactactaactaaacatttgcataatgttttctttaaaaagtacttttgggaaaaatactttgaaaatacatttaatgtctgacattaaaaatcctttgggattctttttggtttgttttctgagacagggtctcactctgtcacccaggctggagtgcagtggcacgatctcagctcactgcaacctcaacttccctggctcaagtgatcctcccaactcagcctctgagaagctgggactacaggcgcgcgtcaccatgcctggctaatttttgtattttttgtagaaagagggtcttgtcatgttgcccaggctggtctcaaactcctgggctcaagcattccgcccacctcagcctcccaacgtgctgcaattacagacatgagccacagcaccctggcctgagttttcttaaaaagaaccttgggcacagagaacctcctgcttccctgggcgcaggcctggcgctgaggctggtgtggggaaagtcggccttgagaaccagattgggtaggtgggggtgggtggagggggagagtggagggcaggcccggcctgcttcctgatcttgtctgcccgagcatatccaaaataaaataccggggtgactcgagctaggacgcctgtcggcctggacattgaataaagacagcggccttctccacgttcctagggaccatttctccttagactccaagatcgccctgcttcagaagttttatctccatctagggagtccgatccaacggagacggaattcactggaaggaagaggctgcccttctacagtctgagcttggtcaagtgtgacactggcagggaacttgatgtgtgccagagacacgcacattgtcacattcaacccacccgaccctctgaggggggtgccttgattacccccacttacagatgggaaaacaggcccagggaaggtatttattcctggaactcacctggacaggtgaggctgggattcacctgtgagatccaaaaccagccctctcgttgctgcgtgttcatcgcagccgtaataacggtggcagacacactgcaaatggctcctggccaccatggcggaatctggctgaatggccatggaatatttttcccaggtttccctggaccttctgagggccttgcttagaatacagtctccttgagaacagaaacagcacgggctctgcagagcagtccccgactccaggctggtgcctgcccggtttggtttcctcctcctcttcctcccaggagaagggaaggagctgggtttccagcaggtttgagaaaggccagcagtttctctttataaatcactctcctctcctgaagacaaacggctttctcctccttcttgtgttcctttgtgatttttctccattttaatgctgccacggttacttcttttaacctggtctagctcgtctgaaaacattctggggggtgtccgtgtattatggggtaacttggaagttgctgctcataaatatgtttcaactgagggctccaaagccccctggggatggccctggccctgccttacgatcttgctggcccccatgtgccccagggcatgagacacggtcgataaacctattctgagtcatctcccagcacctagcacagttcttcgcataccacaggctctcaataaatatttgttgaaggaacaaattggcttgcagtgcctgacactgtagaaagaatcattgggagagtcccttgggtgccaccctggaaacacagctcacaaatctgggaccatctgtcaggctcctggaaggcccaggaaaaaaaaaaaaagccatccatttttcccaaaatagcacaaacaggatttcctggagggagcagagcgggggcgcaggctgtgtttggaaatggaaaatgcagccttgctcgcatgagtcctgctgggttgatttctgccaggaatcccgcaggctcccctgccctggggtgcttcttggcattcagcggtgactttagagcaggtggacacagggaaattggtgaactgttaatccacctcaaagagtttaatgtgcatgttgataaaactgtccttcaccatggacagcccaaaggagtcccagggtctgcttgtcttcggccagtcccttcttcttctccagggcccctcatgcctgctttctgcctgtctgtccccaagcctggcccttgcaccagaggttgcacacgtcggggagaggcgttacaatgcttagacacccggggctcaaatccaggctccatctaccaggtgtgtggtcttgtgcaggtaccgctctgtgcctcagtttcctcttctgtatcatggagatgagtatctcctactcataatgaggtcatggaggaaatgaatggagctaataaaataaagcatttagaatagcgcctgcatactctgtgcttgctaagcgtgagctccttggatttctgcagcctctgcatgcagttcctctgccctcccagctcccatttctgctgagggtgtcaccgtccgcccacttgtgtgtcctgaagtctggggtctgctcaccacccacatcagggcagtagtgcatccgttttcctgggggctgctgtagcaaattaccataggatggggggttcacagtggcagaaacggatcctctcatggctctggaggctggaggtccacaagcaaggtgtctgtagggctgcgctccctccaggggctttaggaggagggtccttcctttgccccttccagcttctaaaggttccagcttccttggctgtgtctgcgtcgctctggtctttgcctctgtcctcccacagcctcctcctctgtgtctctgtgtctcctcctctttctttttttttttcttttgtgatgaggtctcactctgtcacccaaaccgaagtgcagtggaataaccacggctcactgcagccttaacttcccaggctctagtgatcctcccacctcggccttccaagtagctgggactacaggtgtatgccaccacacctggctaatttttttttagtagagatgggggtctcactttattgcccaggctggtctcgaactcctgggctcaagagaacctcctgccttggcctcccaaagtgctgggagtgccaggcatgagccacggtgcctggcctctctcctctcttgataaggacagttgtcactgggattaggggccacccagatcattcaggatagtcacagcttgagatccttaataacatcagcagagacctttttcccaaataagatcacagtcacagcttctgggtggacgtatttttgggaggccatcattctacgcattgtaaccaccgacttccatctccagaatgtccttggaacccatcaccttctttccattccagaggacacagctcaggccttatcatctgtctgagcctctcccggaactcaccacctcctcaccctgtctctaatctgtccttccaagtcatcctccagatcgcatcaacctagaactgtctttcccggacagcagctgctattcacaagtgacagctgagcatttgaaatgtgtcctgttggaattgagatgagctaaagtataaaagacacactggatttggcagacttagtatgaaaaaagagcaaaataccccatcagccttttcgacatggattgtctactgaaacagacgctatcttggatatattgggttaaatatgtatcactctccgatgatctgtctgccagtgtcagttacctagacctgggtaacaggccgctccatacacctagtgatttcaaagaatgaatcgctcgtgtttttgtgggttggctcagaggttcctgtgctggtttcacttgggttcactaaagtgtctgtcttcagccaacaatccctgggctggaagatccgagatggcccctggagaggggccatctgtactggagagcacagatggcactggagggcctgataggtggctggtgccggccttggtctccccagtgtggtctcccggcctccagtcggctggactgacttcctggcatggaggcctcagggtgcaattccaagaagatgggaagctgcagactcttaaggcctgggctctaagatgatgtcacttccactgcatcctattggtcaaagccagtcacacagccagcccagattccaggaagtagagaatagactccacctctaggaaggaggagcaactaagccacactgcaaaggggcctgcctattctgtggccatggaagagtcttctgcccagcctttgactcctctgtccacacgggatcaagcccaccctccccccactcactcctttctgtgctagcccccggcctaccatgcccaagccgcctgtggccaatacctgcctggcctctccccatggaacccccaaactagggccgtctggtcaacccttctcatggacaacagcctggcacctaagatgcattggcgggcaagaacagagatgtctctcgccatccctctcgcacctgctttcacccactcccacgcccctgcatgcccaggctctccctgtgattcaggtatctgcccatcattttctcctcccctggccctatcgacacaaatgcacaacactccgtgctccctcctggctgcagagtagccgtctctctttcagggagactgggagatggttgattggcgcccacattctcagagtctcagacaacagtcccttcaacctgggttccagaataaacacggcggttgactgggttttctcaggctgagtgaaggtggagagaggtttctgtttgttgcttttgagttggctgctgggctgtaaagactcacaaagggtccaatgttctgtccccatgattcaagcatactcacggattttttttgcctccgggttactttatcaacaggccaccggcacagcgcctactttattttctcaggtgtcatgtaaacccatcaggcttctcaaaagaaggaagctggcagccttgacttcaacagcatctcccagcctcccttctcatacagggcttttctaagagcataacggctattgatgccgcgagcagacagacccgccgtcgaagtcttccagcctcaaaacattcaacaagtcacttctttttcttggatcaaggggcctggccaaggaggggccgagccaagctttcaagaagaggttaagagtgagctggcaggatgcggtggtttattctgccaggcaggaggaacgcacaggcgaggccgtgtgctcaggggaccagcctcagggaggacgaggatgaggaggctgtaggctgggctgggggtggggcagggaggaaagatggccaagggaaattgaacaggttttggaatcagccagattcactcattcattcagttagaccaggggtcagtgttctgatcacctcttattcaccacactgatgaaggccctaccttacatagcatgagacagctgcagcgcccaacgctggacagatgaggctggcagcagtttgttgattgcatatactcatagcctggagaaggtgcacacctcgtgccactcggggttacactggagagcacaggcaacccacaggggccatgggcggcaggcttagtagtaactagaggatggggtgacccttggttctgtgggaggatgtgatgggcttgtttgaataatgtcacgtgctggcagggaggtgacgcctgctaggctgaggactgagtggatgtgtgagggactttcctgctagatgcggggagcatttccggtgagagcaggggaatccatggtcagacctttgaggtcctgcaaggccccaagatgtcaaggcagcacttgagattgtagatcttgcaatacgatcagcaaacttgttttgtaaagggtcaagtaatattttagacccggagagccaggagacaaaatcaggcataatatatagacccatataacatgaggtagaacaaattgacgccaaatgtttattgacaaaattcaaaatatagtcattataattgaatatgatgttttacagtcaaagtctcctattgagaagaatggaattcttttgggagctgaggaataacattttgctgaatgggagtttaaagttagtgtccgatgttcatgcaaaattcatccttagctcacgggccgtgcaaagcaggcagtagcgcaggctggatgtggctggtgggctcctttggataagtctttaccctatgctgggtgccgcactaggctgccggtggatgaggcaatcattttgtgctcagttattcatagtctgggtgatagggggacacacaagtaaacagcaaggacaaatcaatatcatcaggacgtgttggcaactctgccaaggagattctagtgcctcttggtgatattggagaaggcttcctaagaaggaccccttaggaaggaacttcgagatgcaactggtgtttgtacatttttgctgtgtgtgtgtgtgtgatccacatttatgccttaggaaggtcacattcacggctgttagaaagctggactgcaagagatggagaccaagagggatgctattgcaatcaccctggggagaaatgaggaaagctcgttccaagggagaggtggtggaaatgaaaaaggaaggtgcgaacaagagaggtttacaaagtacagccaacagcagatgggttgctggggctgtaagagcctctgaagcggacagagcaagagtcagaaaaggaagaagctgaagcaatgcagggaacagagaggcagaagctgtggccatccagggtgggacaccagggtctaagatttcagagctgggccaagtctggatattgagaaggtccagtatgtgggctcaggaaagagtcgctgcggtagattggaagggagagtcctcaaaacaaaagaagtcaaggatatttgacctgaaaatattaggtgattgtgtgcgtgtgtggaaggagctgggtgtgggggagtttctgggccaggcacggagcttggtcaggctttcctgttagctgctgctgtgtaacaagcatccctggttcagcttagtgctgaagacaatttgttatatatgcaatagcccataacctaagaatggattttgtatgaacatttggttatacgggatactggctttaaactcccattcagcaaaatattattcctgagctcccaaaaagaattccgttcttctcaacaatagatttttactataaaacattgtattcaattataattactatattttgcaatagcatatgtaataaatatgtaacaaattatcttctttgtattgcttgtattgctggcctgagacacccttctccagattactggtgtgactttggcctttgcatctttacccagacgtcccgggcggggtgcggggggcttcctttaagcagtccccgctctgcctcttccaccgccacagcctcagcactccagttgctttctccctgccccaccgtttcttgtttgcgttgccctttgttaccttctaacacttaagagaatgtatttattagaggattgtttattgctcagcttctttcactcctggttccctgttggttccatgagaacggggatctttgtcaatttcattcactgatgtattccagtgcctggcacctacctggtccatgctcaataagccgaggctggcctcagaccacctgtcgcctgatcagagaggctgtctgcggccgtctccccaaagctgctcttccattcaagtcccttctatctcattatcccaatttattatcttcccaggggcacttatctaataccgttcttgtttatttaattactgctttactgcctgttcccgtggctggaatataagtgtcatgctaccaggaaaagcttctgtcaatgtcccatccctaaaacagtgcctggcacatagtagatgcacattcggtgttttctggaagtgtctgtcaaatgcctggcactatcaacctgcttcccactaaactctgagacccaattcaccaccacacctcatgcacagccttgcgtacgcagcccttggtcaatatttgctgaatgattggtatttccatttacctgcctcaagatagagggctaggtggaaggatttcaaattctctctttcagcacgatggttcttttggatcaagggagcccaaaggcaggaatgtgaggcgcccagagtcccctcctgcccagccggtccacaatgttgcttttcacgtcttctctgatgcagccgtgtgccagcccttaggagcggctgggccgggccttcctatgtgtcagggcccacagtggagccttgtttcccctcagtcctctgcgtgaaccgtgctggctggctagagcctccctgggtcctggctccagctctgtggcagagacttagagcccgtgtctgctttctgtctcattgcagatttgtgggaagtgatgcgtgaacgtgtgtgatcagggagaggctagatggccacaactcctggaaaatgagtcctgcttctcgtaagatgcgtgttccggtctgcagcctcgccccccacacactggttattcccaattacctgtagaacctgttatgtattctatcttcccatattccccaaacagccccttttttatcctagagatgtctgactcagcaattaaattcagccaaaaagctgcctcctccaggaagtcgcccctgaatgcctcctgcttatctgcattacatattttctctgacttttcagggcttacactcgtttgtttgcttgtgtcccactagattatgagttcctggggacagggcctggaatttccagcacctcgtgggcctgagtgattgtttgggaatgaatgaataaacaagtgagtgagtgacagctcttatagcagccatatcagccgtatatcgtcttggagtcttgatttgcctgtttgttctatgagggctggcctgatggtttttctaaaatcctttagcccagctgttttcagttgggtttttttttttctcctcaggagacatttgtcagtggctggagacatgtttgggtgtcacagctgggtgagggagctctcctggcatctgatgggtagaggccagtgatgctgctgaggctcagccccatagcaaagggcgatccagcccgaatttcagcagtgcccaggctgagaaaccctactagccatttctatgatgttttcctttcagtctgggacccagggagggagactggtacaaagaaatagacaatatcaccaagttctgggagtgtacatagaggcagtgaggacagaatggtgacttcttttgtacctatcagtattcttcattttgtgtataacatttccaagtccacgagctacatggtacagacctccccgagttatttcccaaggccagtgtatcagttacatatgctgtgtaacaaaacatcccaatacataatggcttgtagcaatggccacttattcttattcacgagtctattggttggctgggcagttctgctgatggggctgggttcagctgacctccgtgcctctatgggcagctggtgagtcagctgggggctggttggttcaacgtggcctcagctgcgacgactcagttccatggggtctcttctccatgggagcttgttcccatggcacaggcaggtgcctaaggctcagaactgggctaccaccacctctcccatatcccattggccaaaacaagtcacatagctgggcccaaagcaagaaatagactctgcctcctaaagggagaaggtgcaaagtcactatgaaaaggagtgtggatatagggaggggtgagaattggggtcatttttgcaatcaatctgccccagtcaattaagtacagtttgttttgttcgttcccctcccaactcctgactttcctaattgtactcacagcctctggatgagctgaaccaccctagaaattggcccttacatttcttcacgcatttgatgtattctgttaaacggtgacctgtgtgattctgactaccatagcgatatctgactccctccctccccagatggagaatctcacccacccaaatagacagacagacagacagacagacagacagaaacacacacacacacacacacacacacacacacacacgacattcctgcctggctggctgcccagaaacacatcaaactgaacctatccctgaacaaactcccatcaccatccacctccctaagcttcagtttcagtttgtggcctcaccatccgcttacccaagccagaaatgtcggcgtcctcctcctccacatccagtcgatacccaagctctgccagtgctacttcccaaatattttttggacctaatgctgctaaggtttgcaaactcttcatctctcagttggatatagcaatagccttttaaatcatgtcctcccctcttggattgtcccctcccccgttaaatcagtaaagccatcctttatcctgagaaacacaccctgacagtattgcttgataaggggtgaagacttctgtgttgttagatggaattacaaccacaaatgtccggatcatgccccacccattacctctcctgtgcacgggtgtcccagaggagctgtgcacccagaattgatatcagaagaggaattaacacaaagctttattgttagctggatcgggctagtaatgagatccacagctccatctccccaggagaggggccagaggttggcctggggttgggagaggagctgcaggtacccccttctctattttactccctatttcaactctccagggctccctctgctctccttggatggttggtcttggaaaccagccaccatgctgtaaggaagcacaagcagccgcctggagaggccacgtgtaagtgctccagctgataaatctggctgaggttccagccaataagcggcatcagctcctagatgtgtgagtgagtgattattattttagatttcagatctgaaaacttcagattgttttggattatttcagacctgagctgcagacatcatgaagcagagataagctaccctcaccatgccctttaattccatgaaccaccaagtttggagtggttcattatttggcaaacataaccagactgaaggccatggggtttgggtattattctataaggagtagaaggagccctgagtagttgaaatggggagcaaaatagagaaggagatacctacagctcctctcccaaccccaggccagcctctggccctttcccagggaggaggagctgtgaatctgattactggccctgacccagctaacaataaagctgtatgttttacgctgcttgaagcattgttacctggagtctcactctgtcgcccaggctggagtgcagttgcccgatctcggctcactgcaacctccacctcctgggttcaagtgattctcctgcctcagcctcctgagtagctgggattacaggtgcaccatcatgcccagctaatttttgtattttcagtagagacggggtttcactatgttgaccaggctggtctcgaactcctgacctcaggtgattcacccgccttggcctctcaaagtgctgggattacaggcatgagccactgtgcccggcctggaatttctttaacacgaatatcttagggtgtacattttgcaagataccagggcagaccctcgctagttaatctgagtgctataacctgacttcgaggcaaaggctttagatttacactcagggatgcggctgctttgaaacccaaacctccgtcttccaggtctcctgatcaagcacccgagggagctactccaggagacggcagggccctgaagaagtcatttcctagtttactttcttcctgggctggagaagaacagttgcggcctgacctgaaaccctgtctccccagggctttgctcaagaggctccggagaagtggcctctgtcctgccaagttatggaatgccaccttattgtggaatggtcccatgcagaacacacaccaccccacggaaacacccactccaggtgggggccagaaatccgttgtcttcagtgacttcctaacccaggccagtgggtacagttccagtttccagctagccaagtccattttcacccccgaacctcctgctgagcttttctcctgcatgtcaccacccacagattcaagatcaagaccctaacttgcctctcagactccgggaggacagacagaaggcggaaagtcatgtctcctgaattcagcttttccatgggcttagattcccagtgatcaccttggcggcttcacctggctttcccagcctccttattctttttcatcttcaaaggatggtgaagctattgggcccaaccgctgaggattcaacaagggagattgtgaacgctccaagaacagcaggttccacactgaaactcagtagccactttgaaccaaactgtgtgtgttttcagaagtatttcttcttgctgaagacccgagggactgggctttttgagggtcatttctccagtggatttagcctgcctgggaaaagttttagacaagcagcaggggacaggggaaaatagaatcctggaagatggctcctgttctgtgattgcattttaaaaatctccaaataaattctccgctgtggaaaggtggacatctgttcaattctgcacttaacaaataataagaatttggaaggggtggattttgttatggattcagaattgaaatttcatgctttaattatttttaaaattttaatcattttttattaaaacataacttacacataataaaatgtaccggtttgatgtgtacagttgaatgagttatgacaaatgtatatacacccagctaaccaccaccacaatcaagattccaaatatcgcaatctccccaatcagtaggtattatttccagccagctccccacccatccccagccttgacagccactgctttgcttgctttttttttttttttccgagacagagtcttgctctgtcttgctcaggccggagtgcagtggtgtgatcttggcccactgtagcctctgcctcctgggttcaagcaattctcctgtctcagcctccccagtagctgggactacaggtgtctgccaccacacctggctaattttgtatttttagtagatatggggtttcaccctgttggccaggctgggtcttgaactcctgacctcaggggatccacccaccttggcctcccaaagtgctgggattacaggtgtgagccaccgcacccctcctactgctttgctttctatctgtgcattagatttttctctctagagcttcatagaaatcatacatgtgtaaaacatgcactctttttttctttttttttgagacagggtcttgctctgttgcccaggctggagtgcagtggcatgatcatggctcactgcagccttgatcttctgggagttgacctcccacctcagcctcccaggtagctgggaccatgggtgtgtgccaccatacctgcatacctggctaatttttttttttttttgaagagatggggtctcactgtgttacttagactgtctcaaactcctgggctcaagtaatcctcccgcctctgcctcccaaagtgctgggattataggtgtgagccaccgtgctgggctcatgcactcttttttcgtctggctcctttcactcagcataattattctgagatttaactacatgattgtgtgtgttaattgtttttttgggttgctgagtactattccattgtatggacatgccgtaattagtttgtttatccatccacctgtcgatgaacatttgggttgtctccagttttaggcaattacgaataaaattgctgtcaacatttgtgtacaggtctttgtgtggatttgtaagtcttcacgtctctacataaatacccagacctggaattgctgggttgtatggtaggtatacactcaacttcacaagaaactgttcaaccattgtccaaggtagctgtctgagcatgtatgagaattcacaaagttttttgttttgctttgtaaaaattttaaatagctctattgaggagtagttgacaaaccacagaattcatccattttaagtgtagttttacaaagtgaattttagaaaatttatacaactgtgcaaccatcaccgcaatccagttttcaaaattttaattaccccagaaagttccttcatgattttgcagtcaatccccacttcctaccccaggcaaaaaagagccattgattggccagctttctctatctatagttttgccttttccacaagttccatgtaagtggagccatataacatgtagtcttagatgtctgatttcttccccttagcatgtttttgaggcttgcctatgttattgttgtgtgtatcaatagtttgttccttttcactgctgcatagtattccattgtacgaaaagatcacatgatatggtttgggtctatgtccctgcccaaatctcatatcaaattgtaatttccagtattagaggtggggcctggtgggaagtcattggatcatgggggcagatttcccctttggtgctgtttttatgatagtgagttactgcaagatctggttgtttaaaagtgtgtagcacccagccccgctcttcttcctgctgctctggccatttaggtgcctgcttccccctcaccttcctctatgattgtaaatttcctgaggaccccccagccaagcttcctgttcagtctgcagaactgtgagccaatgaaatcccttttctttacaaattacccagtctcaggtatttctttatagaagtgcgagaatggactaacacattatattttgtttatctggtcaccagttgatggacatttggtttatttccagcacaaggctattggctcaactaccagtaatgacccaaagaaattaatgtatttattactcaggctgggcgcagtggttcacacctgtaatctcagcactttgggaggctgaggagggcaactcacttgaggccaggagttcgagactagcctggccaacatggtgaaactcgagcggaggctgctgtagtctcgagtttgatgaagtttgtatgtttgataaagttttgtttctatgaatgtgccaaaaaggaaaacaacttaaaatgtacagcagtaggtgatgggttaggtaagtgataacagatatcttcctaagggactgataccatctgctctttaaaggttatggtgaaaaacaataattataagggaaaatatacccaatactgtcagaaagattcaatattacgtgcaagttgtctatcaaaagtaatctttgttcatataaactattataaaagtacttccatcttaatgaataatttcaaaataaataccaaagaatcaccttccaacatctgataatgaattatctaataatgaataaacaaagacagacaattctactggcacactgaggcataaagacattgtttcttttcttttcttttctttttgacatggagttttgctctgtcacccgggctggagtgcagtggtgtgatctcagctcactgcaacctctgcctcccaggttcaagcaattctcctgcctcagccccccaagtagctgggattacaggcgcctgtcaccatgcctggctaatttttgtatttttagtagatacagggtttcaccatgctggccaggctggtctcaaactcctgacctcatgatctgcccgccttggcctcccaaagtgctgggattacaggcgtgagccactgcgcctggcaaagacattgtttcttaaagacgagttaaaaatgatatttgaaaataaaaataagatttgtttttactgagaagaaaaatctttactcactccattcattacatgctacaataaagaagaaagaaatctttggaaataaaatctcttctaagatctacctctcattaaaagactgtaaattttttaaaaactggagtggcgcacatcaacattttaaccatgaaggtctctgaaacataattctgcgttaacattttcttctttgtccccttctgtattttttcaatgtattatttccatgtacacttttataatcagagaaaaaccaatagcgattttttcccatttttaaaagagtgaaagaacctgtaaaataataaaaccaaactttaaaaacaatgtatgaaagcttttagctcaaacaagtgtttttcttcaaagtactgaccttggagtgtattacacttattctagcaatgacccagctattaatatcattttataaattccttttcaaggcagcttgtaaattacacatggaaatcaatcttactgagctatacctgctttaataatgacatcattaacaagataaattaccacgtttattcaccacactgagctcagaattactttaggctgtttacaaaaacctggtccaccttcaaaaaggttgaagatttgtcagaattgcagatttttcacaagaatgtagaatgggttttgaacatcgttccaaaaaacggtgggcgccaaacgtttgtttcttctctttctcttacgcctcgacctctttaccgtctgtggagaacagagctttgtaagaaaatgtcaacatatccaccagcctccttttccaaaagtaacatgttttttaaattaaggtttcactgcaaagtggaaatctcttcccacagttcgaaagttctagggagccttctttctgtgcatcaaactctccagagtctgccatataaaaccacaaatgacctgcttaggtggggcatgaacaagagactgcaaccagaggtgcggatacttagaaatggacctcctttcctgcacgttcatgcacacacgtgcatgcacacacacacacacacacacacacacacacacacacacacacacacacacacacacacagggatgcagggaccaggccagctacttgggttcctggattggaggaaatgggtctctcatctttgggccacttggtttggcatccagtaaatcatgtcttcatttctgtcccaaaggaggaattatcaacaagttttgacctgtccaggtgataaaaaattcagattgtcccttagtaccaaaaccttaactacccagggtttataaaatattaaaaaaaccactgagagaaggtaagatgtcaagtaaaagagaagtaaaatagtcctattttcttttccttggagttttgttttattttgacttattttataagtcaaaattttaatatatatattttatatatatgtgtgtgtataaaacaatataacaaaaacattaataaagcaataataatctggtcatccagtatacagctaattttattttttgacattttctttcacttattataaaataaatgtgtacataaaatgtactggtacgttttagctcgggctatcaaacattttcccatttctgcctggccctcgtgatgaccctaatgaccctgtaatatttcgttgtgttgctgtgtcatgaattatgaaaccatgcagcttgttttcaagtatttacttttatagagaaggttgccctgaatattggtatacatatatattttgcttctgtgaaaataaattgagtttttgtgggtaagttttttttttttttgagacagaatttcactcttgttccccaggctggagtacaatggtgtgatctcagctcactgcaacctccgcctcctgggttcaaccgattcttctgcctcagcctcccgagtagctggaattacaggcacctgttttgtgggtaatttttatgcaagaactatgagcactccaaaggaggttgctatggtttggatatttgtgtctccccaaaattcaagtgcttaacctaatgatcagtgtgatattaggaggtagggtgggagctctgggacatggttagatcatgaaagcaaagccctcatgaatgggatcagtgtccttataaaagagacccaggagagctgctttcttcctccccccacacaaggacacagcaagaaggtgccattgttaaccagagagtggatcctcaccaaacaccaaatctgccagcacctcgatcctgaactccccagcctccaggactgtgcgagagaaattcctgttacttataagccactcagtctatggtattttgtgatagtagcctgaatgaaccaagacaggggcctaattcctgcttgtatggtataggtttgtcaaaactataagttctatgtattcaactttttgttaatttcctttactcatggacttgcagatctttaatatactctgcctttattaacttgtccctaatagaatactagtttctattctgttcattttgtactattgttagtttatagttcatgaatgccttatctttagtccattactaactataactttgtaatcataatcaatttatatcctgatgaatattttgtttttcaaactacattattaatctatttcttgttatatgaatttgaaaattatttgtcgtatttttagcctttctatacaaatttctcttgtaaaagtctacttggagacccgatgcctctttatagctgaatttggactatttatatttattgttataatggttttgctttccttgttggctacttgattttgttttctcttagctaggcttcttcattgtccctttcttaggatgattttaatgtgtaaggtatgttctgttttcagtgatataatagtatatttagtggcaaatacctgctttttagtatcacccatgagaagtggactttcctttaagttatcacctttccgcactactggtttaggatttggctttttgagtctgctaagtcagttactactcatccatccatctctcagcttccaaaattttcttgcaattctctcttcttcttcttcttcatgtccccttgaaggtttaagcttttaaaataccaaaacaaaaaaaaaaactgcccttttttgtagttttgctaaaattttgagaaggaacattagatgtatatgtccaatcaaccatcctgacccaaaagtgccccatcctaatttacattatttatttttgtctaaaatattctggttttcatagatacttttccaacatgggaagggttttaaaaactctttctccttttctttagtccttgcagctcttttttataaacatttttaacacctctgttaaagcaaacttgcagttctcaacaaagtgttttccactgatgtctgctaaaatggtacttaggaggtaaagtatgtaagaatatccttctgatgcaattacatttaataacaatatcagtgtgggccactttcttagctaccaccagttctttaatgtttttgaaaattaacttccagtcttggccacagcagcctaagagtccccagaagtagccagttttaggcatatttgaaaggaatctgtcttttctacttgggaggttgaggaactttcaccttctttctcattcttctcatttctgttaacttcttcctcaatctttctttgtgctttcaggatcttctgttttattgactgtctgtatctttggtcccatgtgttgactgctttctgcaatgattcaaaactttttattttgggaattctaccctagcctggtccttgtcccactgtgtcatgtccctgttgattgcagtagtgggaagtctgtgctctggggctaaattaggtaagacacataagacatttagaacagtgcctggaacataggagacgctcctggaaggactgtagttgtttccaaaaactattgggtcatcgtggaggattgctaattcatgagtagggctgacttctgtgcattttctgggtccttttcttttttctttttctatagaacttttcattagggtcagctttcccccctcatgagatcagatttccttgcaattattttctgatcccacaaggccagttccactagtgcctgcgttgaattcttccacatactcatctgatggaaaggggtgggtttggggctgaggagggtttatggggatgttgaattaccagatctaagcccactctgtcaacctgagatctggaaagctgaccactcgagacaactagagatcccttctcctctcttctttaatgtttttgctgttgaagtttcagcacctgagaagggttttagcacagagaggattaagaactggataatcctggatttgaaagtagaatggtgagccagcctgaaataatgcccccatttccatcttgcctaattccccttcttgtgtcaacctttgccagagagaccccatccccagaactgaggttgggaatctggacattgagcattgagacctgttctaatcctgtcacaacttgattctggcttttggaacatgaatcccatgtcacaaaggaagctatgacataggcacagagctacaagatagtgtgatatctttggtgccactctgatgggcaggttgttccagcaaagcatgacagtgtgaagatgctgtgaagttggctcggacagccgggtggaagccaggacttccagaattccaactggccccaggggaagaactgggtttgggggagatgttgatttgcatgtgatttgcacaagactgaaactctgcaagtgacggtggcaccaacgaggtctttctcacctcggtatcgctggcacttacgtgctgggggctcaatacacgttcctggaaggaacagagggaaggaggagcttttcatttctctgctatcttgactttctcaacacttcaacgcgttgatctcattcgattcttacaagtggagggagaaaggatggtttgtcatcacccttactttatggataaggaaaccaagatagcatggcttggcaatttatccagagaagcaaaatgaccgacaacaacgcacggtgaaacgcagtgttgggaatcgcagatggaagccgagcatttcctctacctgtgggacctgcacttttcctaatgctctttcccatgtgttctctgcaggtcctcaggcaaatcctgtggaggagaaagggcaaagtcatcccagtgtctcgtttttgagggaacttgtggctgccatgtggacagtaccaggggatatgtctcagcagccggccgggaactcttggctgcagacagttgcacagctcgttatcttgatgccaaaacaagaaccaaggacccttttccactaggagaactctcggcaagcaggacttgagacgagcggagtccagctcccctggaggtccagtaacaagtcaggcttctgtggggagcaaggcagtggcagggaaggagggggagtaaatggaatcattggagaaagcacattcagaaagccatggcccatgggtttttaggatgtgggatcacagggtgtggggtttgtcagaagcctggctccctctcctcctccccttggggtggtctctggagagtgggggatgccatgacaccagcattagtggctctgggctccgtgaggcgtgagttctgggattctcggggatggtttatgggatggtcacggagcacggtgctttgaggctggctctgcgtccctgactagttaactccggcccacacaggccacgtggtgtttaatggggagggacggagacgcagcagcagggctggggcctccggtgtggaccccccgcaggcagggaggtccctggaggaattcgtctttaatgtctggcttaaccaaagatggctggattctcaactctgcttccgcattcaatcccttgtaagaattttttttttttctgtcaaagtatgaaaaattgcagatgcagccacccactcataagtagctggaagaagccgcagggttcgaataatcttttcggaaaactgtggatgcaccacgtagcctctggaaactccaccgtacactcgtgagagaatgagagccagaaagacaattcctttagtattaatataaaaatagatttgtaaaatattacctattttttaatattatcattatattatatatttttgtatgttatcaagggttgaatctgtcccatgagatgtgtgtgacccgtatccttagcgggctttcttgagggcttctctgccttagaggagggaattgagggtgcccagaggcagaggccctgtatggagccagctcatgaaatcggggagctggaggctgccgcgtcgacagcacccaggatgtgtctcagccaggcccacagctcctggctgcgctgccacacgtgagcagaaagtcgcacggctcatggccttggtgccaaaatgagaactgagcactttttccagcagggctgctgggagctgcctgggagctctggcactggaggagcagacctctccttgtttgtgaagctctcagccacggccctccagccagcgctctgccacggcaggagcgggagaaagccttcaccttggccaaaaccagcgcggtttccttcccttggtttactttggtccatgtcagagagtctttatttcttttctttcaaactttctcttccttcctcgttggcagtgattctcaaagtatggtcaaggaacccctgagggaaccccttccagatcaaatctatttttatattaatactaaaggaattgtctttctggctctcattctctcacgagtgtatggtggagttttccagaggctacatggtgcatgcacagatctgaaaagattgttcaaatcctgcttcttcctccagctacttatcagtgggtggctggatttttttcacacttggaccaaataaaacatcttacaagggattcaatgcagaagcagaggtgagaatccagccatctttggctaagccagacattagagaagtgtacaaaaggtaaaaccatgccactcttctttcccctcagtcttttattttggaaagcacagttatttgtcctgaaaaaaaaaatgtgttatttatgtcaacatgtactagatacataattgttattttaaaatatataattttttaaaaaatcctgttttaatttcaaatacaataaatatcaacagataaagtgtatataaaagtaaaagctctttgagaatcctcagttaagttttaagaagagggcttgtgtattagtttcccagagcgtctgtaaccaattgtcacaaatttagtggcttaaaataacagagatttattctctcgcagtcctggaggcccaaagtccaaaatcagtaccactgggccaaaatcaaggtgtcagcagggtgctgcttcttccaagggctctagaggaaggtcttccaggctctgggggctgctggcttattggcttgtggctgcatcactccagtctctgcctccgtcctcacacagccctctcctcttctccatcttaagtctccctttctcttataaggacacgtcattggatttagtgctcacctgaaaaacccagaataatctcatctgggatccctaattacatctgtaaatgccttttttccaaataagatcccattcacagattccagggatatggatgtagacacaacttctgagggaccactgtgtagcccaccacatcctgcaaccaaccaacctgagaactgcggctccatgcccttcctccaatcatcagcatcccactccccagtttgctttttaaagagataatcagggataaagatcacatccggtgaaaattcaactgccatctagtttagattttccccatgcccctgtgatagcaacgagaccctctgccatccactatcgccctggctttcttaggatttttctggaaatattctgccttatcctgtctcttcttaggctgaagtgggtgacaggcccccaggctgccttccccttgggagcctggttgggtcacattgtctcctctactaaagaaaaaagaaattacaacccagaatttccctggatatcagacaactctgtccaaatgtagttaggatgacttaaatgaaagagggtcaggaacatatggaataaattcttttaaaaataaacataggttttaagaagagtgaatgggaaagagattccagacaatgagtcttaggtttttgctaagacccaaaatgtcaatcaggattagagcaaagtatcagctgactccttcctccctggtccttgggggtagttgttaacagctcgaattccagcggcggccttcttgggttcaagtttcattgctatcctttgccagctatgtgagctggagaaaataactaagcctctctgtgtgtcaatttcctcacttatattgtgggaaaatggatattagctaccttgcatcagtcaggctatgctgcattatgctgcagtaacaaacggccctaaaatctttgttcatgaaacaaaggattgtttttcactctcaccccatgtcctttgcagggaggcagggagttttgctccccttcatcctcacttcagtactaatggagcagctttaatctagaagatggccagcctcctgacagagggcaaagatgatgagacaaagcacatcctgtcttgtaaagctttcaagttcaagtgaaacacatcacttatgcacacatttcattggccaaaatatgtcacatggttacacctaagttcaacagggttggatggcatcattcttccatggaggaggggaagtagggtgacggggatggcatacattggtgaacagtgatacgctcttccactgaccctataagctgttgtagggatcactgaggatggtgcctggcatgtcattcttactaaatattattacactcaaataataacatacacctgtcccctcctccccagtcacttggcctccatcaccatccagtgtcctatctgaagaagatttttcttcctgtaacaagaaagatgagaagggtaaaaacacagtccttttgctgagtcagatgtgttcctacagctgcggcagtaaaatgggactcttcccagatcttccttttgttgttgtctagttttagtcttcttcttttcattgtttttaaaataatgaaggtgaggaggtaggtatttatccccctttccatatttccatataatgcttttttttttttttttgagacagagtttcgctctgttgcccagctagagtgcagtggcacgatctctgctcactttaagctccttctcccgggttcacgccattctcctgcctcagcctcctgagtagctgggactacaggcacccgccaccgcgcccagctaattttttgtatttttagtagagatggggtttcaccgtgttagccaggatggtctcgatctcctgacctcatgatccacccgcctcggcctcccaaagtgctgggattagaggtgtcagccaccgcgcctggactttttttttttttttttttttttgagacagagtcttggagtctcactctgtcgcttaggctggagtgcagtggtgcgatctcagctcactgcaacttctgcctcctgggttcaagcgattctcctgcctcagcctcctgagtagctgggattacaagcacccaacaccatgcttggctaatttttgtatttttagtagagatggggtttggccgtgtctgccagactggttttgaactcctgacctctgcctcatataatgaattttctttctttctttctttctttctttctttctttctttctttctttctttctttctttctttctttctttctctttcttctttctttctttttctttctttctctctttttctttcttcttttcctctcctctcctctcccctccccttccctcccctcccctctcctctccttcctttctgacaaagtcttgcactgtcacctgggctgcagtgcaatggtgcaatctcggttcacggtaacctccatctcctggattcaagtgattctcctgcctcagcctcctgagtagctgggattacaggtgcctgccaccatgcccggctattttttttgtatttttagtagagatggggtttcactatgttggccaggctggtctcgaactcctgatcctgtgatctgcccacctcggcctcccaaagtgttgggattacaggcgtgagccaccgcgccagcctataatgcatttcttaaaaacagactctccatcacttatttggtacccagtacccagcatggtgtctggtgtacagtagctgcttgtttagggttcgtggaatgaacagatgcatgaatggatggatggatgaatgaatgattcttaggagagtgctgatagatgttgaataactgggtctcttgggtggagggaaccttggtttgtagaatttgccaattcccgtactgtaaatcctcttagtgtgactgatcttgagctaccaatgagatgtcagtttacatggcattgggaagaggtgtgcgggtcacctcccatggctgtatgagtcagtgtgagcacactacctattcccctcttgctttctaccaaggaagagctcacttattcaaaatcaactcatttcatttttgaactattctcgtgattatcaaactcatctaaaacaggatcaatgtcttccttggagaaagaggattcctctctccttagcacaaaagactagaattgagaaagggatgtacattgttttgctgtgtgatctcagacaagtcctttatgacgaggatgtgaaagttgtgcagattccagttgacccggaggataaatggctgcctgcttgatggtctgcgggagatgctttgtggttttgttcggcaccagcagggctgtggacatctgcccagcttaggctaaggaggaccacctggcgtggaacctttgctcttaagcacattgtgatcacaaatcagaactgacaaacgggcttagaaatccttctacaaattttccaaaacagcccagcccagcgactgagcagcaggtaaccaagaaaaacaaaagagaaaaacaataatctccttattctggaaagttcaaatgtgggccagagcctgttcatacgattttagggcaatgaagggaatggaaaagttcacgttttttcttaaaaggccccctagtaccgttgttggctccagcaggggtcacatcctgttgcagaatcaatgtgaaaatcacacccagcccccctcagcttcctaatctccagatattagagatgacggatggtagcagagggctggatttcatccatggcttctgcagggctgacagctatgcttggctctctgcttggtgtcagatgctggtgaaattcagggtagtggaggctcttagtggcctccctggattgcaaaagggactggttctcttttgggggtttgtccttagccctgaaaatggttccaggctccgctgggatgcctgagtttcctagacctcagggagtaagtgaactgtcagggctgtgagtgtcctagtggatttcttcagagtttcctgaatgttgagctttcctacattgctccagacaccaggcactggggtgtggactgtcttccaagtttatccccgcccctaatgctcacaggagtcatcaaggattcagacttctcctgaatcccccatatcccctgcaccagtaaaccttgaacattttctctccccgatttgctcatttctccatctctcctgcttctaccagagtagcagagagacaagggctgggacttgtattccatcatgaaaacccaaccatgaaatcaggcttcttacccacatgcgtcccatgtaggcaaagctatgattttgcactaaaaaagcagctttggctgagctggcaagtgctagactaagaccctcagcatgaagcttgtttaccgagtttctcagaacaagattttgaaatgaacttgcaaattattcttttttgcccaggagatcccaacaagtagaaacatccccttctagtcctctccagaaagccactgcagcaggggcaaaactctacctatgccccttagggttgtcagctagacctgagaattaaatggatataagacagattcataggacaaaagcaaacaaccttatttatttatttatttttgagatggagtctttctctgtcacccaggctggagtgcagtggcacgatcttggctcactacaacctccgcctcccgggttcaagtgattctcctgtctcagcctcccgagtagctgggattacaggtgtgtgccaccacacccatctaatttttgtatttttagtagagacagggtttcatcatgttggccaggctggtctcgaactcctgacctcaggtgatccacctgcctcagtctcccaagattctgggattataggtgtgagctgccatgcccagcccaaacaaattgatttaataaattttatgggacacaggatccttccccaaaaatgtagcaacccctaaatgtttttatactaggttgaataaagagaggcgacctcttttggaaaaggcactaaaatatatggagaagctaaaggaagatataagtgattttaacaaggtcagtttgtacacatttctctcggcctcgcctccccatctccagtgttgagaatgtttcatttctcctggtggaaagagggcagctcctgcatgggactttcgccaggcctggccccttggctcctcaagcctcatcccccaccatgcccccttcactgtgtgctcgatcactggggcgtgcttcctgatcttccaccaccccaaacctttcccgactcccttgctgacccctctgctggaagactctctcccttctttgcatagttggtcttggtattgtttcttcggccgctgcaacaagtatcccaaacaaaagcaatctcttctttcacagttctggaggccagaagtccgaactcaagcgtgtttccctctggaggctctgaggagggtctgctccaggcctcccttctagctcctgggggttgctggccacccttggtggcccctggcttgcagatgacacctctgatctcagcctctgtcttcatgtggcctgctccttgtggatcttcccatcgtctgtcctctgtatgcgcctgtctctgcgtctctgtcctctttgtataaagacaccaatcatacgggattagggcccacctgaatgccttcatcttacctcgatcacgtctgcaaagaccttgtttccaaataaggctccattcacagaggctacgactcagtgtagctcctttggggacagagttccacccatagctgtctgttcttatcgtgcatgtctcggctcgaatgttatctcctcggagatgctttccttgatgatgccatggcaggtcttctcagcctccacacgggggacgtttgaggctccatcattctttgtggtggggctgtcttgggtgtcgtaggctgtttagaagcatccctggcctctaaccaccagatgctggcagcatgcatttctcctccagcacccccaacacacacaaccagaaatatccccctggctgggagggggcacaatcaccctagatgagactcaactgctgctcaatgaaatgtgatgtttcccagaccttttctttttattctccctcttttttccttccttttttccttttcttttttgtagcactcagtacaatcagtaattttcttgtttaattatgtcttctgtttatcatcggtggaggttttttgttttatattttgtagaggtggggtcttgctatgttgcccaggctgatctcaaactcctggcctcaagcgattttcctgccttggcctcccaaagcgctgggattccaggtggaagccatcatgcctacctaatttttgtatctttactggtagaaacaaggtttggccatgttgcccagactggtcttgaacttctggcctcaagcgatcctcctacctcggcctctcaaagtgctgggattccaggcagaagccacggtgcccagcccatcggtggaggtttgaaatgcggctgcatgtccatgtcctttgacagtcgttttctctttccattgccctcccttcagacccttaggccctctctgtcctctcaatacatgtgggaggaggaatgagagcaggcagccgggagacccaaatcaaggctcagtcctttctttgcctccttaacccccagtggtcctcctgcttgagtgagcctcagaatcccaggggagctgatgggaacagaccgccgggccccacctctgcctttctccctcagcgggtccgggttcccattgagaagccacattcctgtcgattcccgggggatactgttgatccagggaccgcaccctgagaactatgattctgcttcaattcataagcaccaatggtttacattctgggctattcctaagtcctgcctgctttttttttttttttttttggtgtgtgtggcatttttcagatagaagaaaagcagccccgagagtataatggagttgctggtgcaaatcccttccccagggctgagaattgagaagctgcagcacaggggcagcccggtggcctggtgtgccaggggaatgccacccacagctcacctcctcggagcgatgccccaccggcagcctgagtggccttttcttgcaaaggctcgttagaggacacagtgacaggtcttgcccgcaccccagctctggaaacagccagcgaacgtacatagccgtgggaggctgtaataggtcccgttaattatgctgccatttgaaggaacgtaatcgtccttgcaaagtggaaaaatgacgggttaccagaggctgtcagaggcggctcgggtgagctgtcagcccatgcacaagtgactttttaattgaaatcggtttctgttctgcttcgctgggtccctgctctcttttagaaggctcacatccttcggcgaggacagacacagacaccacccagggaggcggtgtcaggaataaagtgagcttgtctcagcccacaaacagccgcgaatgtcagggcatgggagaataattagctattccaggagatagatttgttttcatttctaaccccaaagctaattgtaagaaatgaaatctgtgtttgtttttctttaggtatgtttgaatttacaagtcttaagtctttgggaactaggtcaactagaccttgcatatgcttacaccctggatgaataaagtctttatttacacctccacctctctccaaaaaaagaatttgagacagcatacaacaaagagcatctttcaataataattaaaaagattagtgtgacagaaatggtaagttaggtccagtgaaaataggagtaagtatgccagccctaggaatgaacaatatctacgatgaagcatctgattcagccctgagcttcctggtagtgaggtcaaaaagagaaacacaggaagtctcatctctctcactatagaaagaaggaaacagcaattccttagtttatttctgataccaaactctaaagtaaagtaaattcttatgttgggctttatataagggatatgaagttacaggtctctttatttttattttttatgaggcagagttttcactcttattgcccaggctggagtgcagtggcacaatcttggctcactgcgacctccgcctcccgggttcgagtgattctcctgccttagcctcttgagtagctgggatttcaggtgcatgccaccacgcttggctaatttctgtatttttagtagagatggggtttcaccatgttggccaggctagtcttgaattcctgacctcaggtgatctgtctgccttggcctcccaaagtgctaggattataggtgcgagccaccacacccagctttgagttacagttctcttgacaaacattttatagcaaatgtaaatatggaagtcccatgatggtttcttgaaataactttggctagaagccaatccaattaaggtaattcatcaaggagcgaatctgacatgactcaagggtgaaggttccatgtggccttatttgatctgaagatggacctttttgagaaatggaggagtaatattaagactccagcaggctgtgctattttagctattttcattgctaaataaaagggcccattctggcttgctcaaatattgggagtattgcaaggctgtaatacacgcttaatgccttccacacgcttttcatcagaattagaatgaaccctacacaatcgggccctgtctgagggcagttcatgcctcagagcctttgcactcgctgtttcccccacagaacactgttccctcaatttttacatgctaggctcattcattaaatctgtgcccaaatgtctcttcttagagaggcctttactgaccacctaatgaatacagccttctcacccacaagccactctctatcatatcactctttcattttgccttaattgcagtcgtcactctgaaatcatcttattttctgttgcctctcctcatgagaacagggatcatacctgtcttattcactcatgaactcccagtgccttaagcagtgccaggcagttagaacatgcctcaaaattatgtgttggatgaacaaataaataaatatacaatgaatatttggcagtcacccaatgccaagaagccagccctggtcagaaccctcatgtacagttgtagatgttgtacactgcacagctgcaggtgctgtcagttatgtggttttccccctccccaaaatgtacactgcacaccctccccagctaaatgcagcaaccctggacataacgtctctcagaggaaggaactaggaagccctaactctcaagaaggtacgaagacttcagcggacatgaggacacttttctccagggcaggcactagtgggactcagctactctctgcttctatatctctgggtgtcttcttgcgtattctcttgctatcattcagacatcctgagctctatgcagagtgtcttggtcatagctttgacttgcccctggcttccccatattcatgtttcctctccacctcaggtctttctgatcttattgccaaccacctgatcccctctacattcctaattcaaagaaggaaaatcttattggtcttgcttatcctgtttgggcagagtcttcattctaagcttcctcactgattgccagccagccaatggattggctgctgacattgagttgccccctctgtccaatcagcttcacctatgaggcaagaggcctctggttcaaagttggggctgtaccttggatatgggctgatggtggggcagcctgtcttctccttgaatcatggggcaacacattgacttagccaggctcaacttcccctctctaaggcgagccaggtataggccacagacagacaatagatctgtgtgtctgaaaaccaagtggacaaggggcagggcttctatttcactgtgaaaaccaaaccaggaaatcaagcttcttacacacttcatacacaggcagagctatgaattttcacagaaaagcagctttggctatattaacaaatcctagatttagatggtcagcatcaagcccatgggatatttgtttgcaggttttctctgaagaagattttggggaatgaagctgcaatttattctcctctgacaaggaggccccaacaaaggaagctcctaacttctgatcctcttgctagcaaggaggctgctttcccctgaacttcgctgtcccactgtccagattggcaagggcaccctcgggcccacttgagaaagctgcgaggctttaggaaggctccctgggccttggtggctgccagggacagatcctcttggggaactactgtccttccttctgtgtggtcgtcccctaaagtggaatcttttttttttttttttttttttttttttttttgagactgagtctcgccctgtcacccaggctggagtgcaatggtgccatcttggctcactgcaacctccacctcccgggttcaagcggttcccctgcctccaccttccgagtagctgggattacaggcacacaccaccacacctggctaattttttgtatctttagtaaagacgaggtttcaccatgttggccaggctggtctcaaactcctgacctcgtgatccacccgcctcagcctcccaaagtgttgggattacaggcgtgagcccccgtgcctggcctaaagtggcattttaaaaccaggccccgtggccagtggctcactctaaagggtgagatccttccctctgagtccccattttaaacttgagaaaagggaagtgcagaggagttaagtggcttgactagggtcactcagcaccgagcggaggggcccagtcttccgcctctgagtctagaatcctttccgtggcgccacattgtcttcccggtaactgctagctgtggatgctcatcttcactggcatccctactgatacggtttggctctgtgtcctcatccaaatctcatcttgaattgcaatccccacatgttgaggtaaggacctggtgggaggtgactggatcatggggacagttcccccatgctgttcccgtgatagtgagagagttctcacgagctctgatggttttataaacggtagtttccttgcatttttgctctctttcctgccaccttgtgaagaaggtacttgcgtctcctttgccttccaccatcattgtaagtttcctgaggcccgcccgcccggccatgcagaactgtgagtcaattacacctctttccattataaattgcccagtcttgagtatttctttagagcagtgtgaaaacggactaatacacctacaatgcctagtgttggcttccagatggagatggtcacagctggctgagatgaaatctctcaggctgttgcctcccaagcatttcagtgctagcaccctctcacctcagggcctctgcacttgctgctcctgcctggagcccttgtcttccagatggtctcatggctcactcccttcctttatctatttgcctcgttaaaggatccttctccaagctcctatcctggtgtttttcctaactggggcatacctctgcctgtcagcagccactgctacctgccatccaaatgtctgtctgtttgtttgtttgtttattatctgtctgtccactggaacatcagctccctgagggtagcagggacattattttattctctcctgtgtccgcagcaccttgagcagtgcctggcatagagtagagaagttagtaactatttattgaatgaatggatgcctaatcaatattgatttctttgtttggactttctgttggagtgaagagaagggaccctgtgggctcatccaatgctatgtagggtaactaacttgtcctagtttgccaagacttttcccagtcttagcattgaaagtcctatgtcctgtgaactcctcaatgcccagcaaactgaaggttggtcaccttagggctatgattttatgagcgctgtcatccatgctgttaaggatagcagctcaccgttactgggtgccagatgttgctctaagcatgttataggaacgacttccttgaatcatcgtggtggtcccatttaacaggtgtgaaaactgaggcacaaagagtgaggcagtgggtagaggcgggttttgaatccatgcaattcacctccccagtccaggcagtttgctccactggcagccagcctcttgatcagatgggaaagcccttccagcacccaaagctctaaagtctgtgttccacccctgctggccacagagagctagccccagaaggaccaccctgtcagctcagagtccctgagtccacacagctgccactaagatgcccatgagctcatgcctattttgttttcatcaccctagctccaaatgaaattggtaaaaaaaacaaacaaacaaacaaactgtgtataactaactaactaactaaagtgggcaaaggaacagaaagtgacaagagacataaataaccctgtgaaatggggaactcggtgagccagagagaagatcaaatattggccataagatcaaatattggctgtaaatgccagggacacgtttacaagctgagaacgagcctgccctcccctcgcccacggcggctcccatgctcccattagaatgggaatatggcagggtgcctgcccaggagctcgcctggcccacagggtgggctgcccccgggagagaacagctgcccagggctggaaaccaggggaagggatggagagggagggatggccctacgtgtgttttaatcagagacacatcttattcaccatgttcctttttatacgtgttgaagtctgagccatgtgagcctgcttgaaaaataaatttaggatcaaacaagaaaaacatctctaggcaccttcctgaccttcccacacaaaggaagtaatcttgtcctccttcaaatttccaagtccttcgattttttattgtgggtgtttaataatcatttccactggtacacacccacaaggatggctgaaatgaaaaggactgactgtaccaggtgctggcgaggacagggagctacgagggctctcatacggtgcaggcgggatgtaaaatggtgcagttgctttggaagatagttgggcagtttcttaaaaagttaaacaggctgggcacggtggctcacgcctgtaattgcagcactttgggaggctgaggtgggcggatcacctgaggtcaggagttcaagaacaacctggccaacatggcgaaaccctgtctctacaaaaatacaaaaatcagccgggcatggtggcgtgtgcctgtaattccagctgcttgggaggctgaggcgggagaatcgcttgaacccaggaggcggaggttgcagtgagccgagattgcgccattgcactgcagcctgggtgatagagtgagactctgtctcaaaaacaaaacaaaaaaaatgtgaaacatatccttaccctgtgacccagctgttccactcctggtacgccccatagaaatgtgtacatgtgttcaccaaaagccacatcctggaaagtttgtaacaggattctttgtcacagccataatcttgagaattacccacagatctgttagcaggtgaacaggacaaacgtggtagactcacacagcgtgacgtagcagagcgatgatagccagtgtctgctgcacaagatgtggatgcagctcatcagcgtgatcttcagccagacaggaaagtgcatgatcccataggataccatttgcattgagtttagaaacagcaagtggtcctgtagcgttaggacttgggatggcggtgcagtggaattgctatagggcctggaaggtggcccgcagagggcatttggggaattaagaaggggctgatttttcatctgggtgctagttatgtaagtgtgttcactcgtgaaaattccttgagccgtacacatacaatttttctgtatatgttctgcttcaataaaatgtttgttaaagctggatgtggtgcctggcatctgtaatcccagctactcgggaggctgaggtgggaggatggctcgagcctagaagttcgaggctggagtgagctgtgatggtgccgccacacttcagcctgggtgacagagtgagaccctgtcttacccaaaaaactttttaaaaagacagtgcaaaatgagagccacagagcatcgtggtggcccagtgctgcctgtgacttggtttggggccgatgtcttcctgcctcctctcatttacagacagcgcatctgcaccgtcttcaggcctccgggtgagagattccgtgtctccctgcaaaatccagcagcaattctaccacaagcaggtgagtgtgacaggcccgaaaggtgcgcatgcccttgcagaggctcagatgtcccgaccttggacaacggcactggtttggctgcccagctcgagcttgcctgcctgtgaggtcgccccacagcccgggtaatgacattccagcgtgaagccacaggctgctttctctgcccctatccagcggtggccagccccagagccaaggacaaagccatttttagaagaatgactgagaaacattttggcggcttctccaggtctgccaggacctgcaacgtacctcagggtcaaactggaaggtatttgcagttcataaaacggacacgaggcatcttattaccaatgttattcttggatggaaattatatttcagagacactggagacccaggtatagaatccctggttcacagaccttctcccagctagtgtgcgatgagcatgctgcaggatcgttaattgaatggtgaacaggaccagggtttcccagggggctcacaaatgagctcaaagagatgctttgcggggtttgccatggcttgggtgtgaggagccacctgtgagtcttggttggagtggtctgtctaagctcacatccaaagaatgcacagaactttccaggtgatgcaggacagaacaggcatccctaacagaaaatggcatgtgcaaaggccctgcagcaggagcatgcaggaaagaaggcaaggttgtctgggcccagaaagggacaggagtgtggagaggtgggtaggggccagaccccacaggcccttgcagccacgttgaaaagttttgctttattctaaagccaacaggaaatcatcaaaaggggttaagggagactggagctgggggtgggagggcattcactttattgaacccacttttggaaagatcactctgcctaagtttctttaaagccaccctgggctggcggaaagaaagatgtatgggacatggcttgtcctgcaagaagtttacaattgagatggagacatggaaataaactgtctggagaaacacgtgatgaggcaaatgaatgacctagaatagcactgtccactggaaataaaatctagaccagcaccctcctctagaaatacaatctagaacagcaccctcctctagaaatacaatctagaccagcatcctctagaaatacaatctagaccagcaccctcctctagaaataaaacctaggccagcacaatcctctagaaataaaatctagaccagcaccgtccactggaaataaagtctacaccagcactgtccactggaaataaaatctagaccagcaccgtcctctggaaataaaatcttgaccagcaccgtccactagaaatgtgagccacaaatgcaagctacagatataattttaaatttcctagtagccacatgttttaaaaagaaacagatttcctgtactgggattcttctgaagacagagtggctctaatcactaggagaagctctaccccaccaagaaaaaaaacgaaaacaaaaaaacaacaaaaaaacagaaacaggtaaaattaattttaaccaatattttatttaacccaatatatttaacacgttttcaacatgtaatcagtgtagaatgttatttatgagcttgtttcacaatctctccgtattttacatctttgaaatccagggtgtgtttgatgcttccggcacatctcaacctggactagccctgtttttcgtgcacagcagcctcgggagtttaggggctgtcaaactggacgacctgggtctcggcgataggtgctagaggctgtggcttgagctaagacttttaggcaggaaggacgggaagaaggcagaaaagatatttccaaatgggagtgggatagagaaaaatccaaagtcaagtaacacacgccaagtggtcacatacaagagcattcatgactccgtggtgggtgacaaccagaagtgagaaacacctgcgtgtgatgaacagaggcctgagcgcctggtgtagtggatcagtccaaaggaacagtaaccctcacacccacgaggatggccagaatcaaaaaagcagagaataaccagtgctggcgaggaggtggagacatcgaagcccacatacattgccgctgggagtgtaggatggtgcagctgctgcagaaaacagcccagagcttcctcaatcagttaaacacggaattaccctaggacccagaaattccacttgggtctatatctggaagaatggaagacagtgttctcaccagaatgtgtgcacgaatgttcacagtggcactattcacagtagccgaaaggtggagaccaccgaaatgtccttccccagatgaatgggcggacaaaatgtggtgcatgcttgcgtgtgtgcatgtgtgtgtgtacactgggatatgattcagccataaagaggaatgagctccaacccatgctaccatgtggatgaaccttgaaaatatgacgctgagtgaatgaagccagacacacaaggttgtgtggtgtgtaattccatttataccaaatatccaaaatgtggctacagccagaatgtcgatagatctatagagacagaaagcagatggaggttcgccagaggctgggggaagggaaggaatgaggagtaattacttagtgggtaggaggtttcctttgggggtgatgagaacattctggaactagatagaggtgactgcaccactgtgattgtcccagatgccccaatggaaaagtgtatttagtctatcttgccacatagaaataaattttccaaaatctaaaaaaaagaactctagagctacctctcagtcaacatggacatatttcacaaaacagcattgagaggaaaaagcacagcattgagaggaaaaagcaagttgcaaaagaatacggtagcaggggttgctgccgccacaccccacacctccccagcccacccaagcccctggttcctgcacacaatggctgctttccactccaggcacctgtgtcgccctccctgaagaattcctctgcccacacaagcagtgcttgaccaacgtgatggacgggaggtatcagaacaccgaagcatgaaggagaggccatagactccagcttccccggcctctggtggggacaaggctgagttgtgtccaacactctctgagccccgaaggctggcccctgcccacagccgcctcaccagctcccctttgttgcctcttctcccttctgttccctgcgtcactgggctcccaggctcacctcccacggagactctgcaccaaaccttctccagatctgctttaggggaagccaaacacagacagacccacgtgacatccaaccacagaggccaggcttgaaaccatgcaccacagcagacgcactgcatgggtggtgacaggctcaagacactcgagggaccgacaacaccaagtccggggtggtggctgctgccactcccgctgtgtgggggtgggctgggataggctggggatgccccctgcgaagggcaccccaggggtcacacacatcgtggaatcatttacttcgtaagcacgggtggcaggtccccgggggtggtgatgcatgtatttcttgaacgcctgaaatatttcatcatcatcacgaagcaaagcatgaggtaggtgtgtttggcagccaaggcattgagagggatggggcatttcgaagtggaggatagggtgagcctggactcctgcccaagcaaagtggggtggcactgggtgtcctacgggggggaggccgggagacagggctctttgtgtcactatgcctgggacccacgggtccaaggccgtgagcggctcctgaggcagggaggccaccatcacagctgcagtcagatggcaccgtggtgaggggtggcgcagaatcaaaagagaaaaaggcgtgtgaacacacttcaaaggcaggtccctaagacctctgggcttaattggaagttggcgccaaaagtgagtgaggcgttggaggtttcaagtctgggtgacgaggtgaatgggaggacccttggcaggcgtctggacacccagagggttttatttattttcatctgtcagggcagggggctggaatgggtttgtgcaggctcacacgccatttgtcctgattttggagacaggctgagaccaggaaccctctgacctcatcacgttggatttccaggtaatcctgcagcccctacgttgtcctcccctgagctcagagccccattcagccctcccagccctggccacgtcacctatgggaccccggaatgcatttctgagaggcaggctctggctggggtcttaccccacctttctcaaacactttctgtcctggggcccatgcactcacggctcttagggagatcttggtggggttctgtgtcccctctgacagagcctaaatgcccccaattcttcaccccctttttctagccacaccctttgccacgtaacttacttttcccagctttattgagctttatttaagtttgatggattttggtgattgtatacagtcatgtaacggcccccacagatgagatctagagcacttagaagatccccaaaacttccctgtgccccctggcaatcaaacctcaccctcacccccagctccaggcaatcacaaacctttctgttgctataactttgccttttgtagcattttctataaatgtctcctcttgagtttagctcctttcacttccataatgcttttacactcattcacattgtatgtgcatcagtaattcactcttttttgttgctgagcaggattctgtagggtggatagactacagtttgcttatgcactcacccattgatggacatctgagttgtttttattggggtgattgtgaaaagatagcccagtgctatagacatttgcatattggtctttgtgcagatgtagctcatttctctggggtaaacactgagttgagcaattgctgggttgcatggtaagtttatgtttaattataaattctgctagactatgttccaaagctctatcattttgcattcctgtctgcagtatgtgcaagttccacttgctccacatccttgctaacacttgttattgtcagtctttttaaacttagtcattctatggggtgtgcagtgataactccctgtagttttgattcctgcattaactttgcagcaccctctatgctggccctgggctcagccatgtgactggatttgaccaacagaatgaggcagaagtggctgggtcagttccacatctgagtctcaagaggccttgcatgtttctgcttggtctcttgccctctgctacactcttgagaatgtctgtgggctggtctgctggagggtaagggacacatggagcaatgctgagtggccccagttgtcccagcaagaccaacctagatcagccaatggtcagtctttctgtatctttcatgaccttgacacttttgaacaatactggccaattatgtaaaatgtccctcaatttggttgtgtcagatgttttttcatgattacattgaggttatacaagaataccacggaagtgatgtcatgtcctcaatccatcttaccaggggtgatgttaaccttatcaccttttcactggagacattgacctttgttaaggtggcatctgccaggtttctctctgtgtatttaataagtatcttatggggagatacttgagaacttccaaatgtcccctttctcttcatatttttacttgatggttttagcatgcatcattgattcctgcctgcagtaattaagactgccatatttgcttaatggtgactttctatttcatcatctctcctacacactcattcattagaactctaccatcaggaagagctgtgtgttctccccatcctatttattagatcaatcatttattcatagcagtatggactcatggatacatattttattctgtgggcaatacccgttactatcattatttgtttttcttggcttgaatattctcagatttgggctttgggtgcttcttgtagtttgccgcaatgcccttttgatgtgatgctatcattatttttagtacatccttactttccaacagtatgggatcatctttgttttccccatcccagtcctgaaagtagccctttctccaagtgttcactggttgcttggttggagaatggtgcataggaaccaagatctgagtgcaagggtgctcttcactgttgggatgtcattgcttctgggtgtgttggagccagcaaatatatatatgtacactaattcatgcatgcacacatttgcatttatttatacatctatccatctgcgtgtgtatacgtgtgtgtatatgtgttaccatgagttaataccaattactctgatttcaatccaacacaatgggttctttctaattatttttaatttctctcaaaatcacttcttctggttcttccagaaaatgagctcttcacctagcttaagaatgtagagatgtcgtgtatggttgggcaggttgttcactgtccaagggtgttccagctgaggagagcgatgggagctgaaagcatccatgctctactccctaagctctgcactctaacatgtgctctgggtccaccagagtaagggatgccctcttttcacttgtgcaaatgcactgggtgagctagcaacagacctggtcgactgctgtctcgggatatttttgtgtttacttgtgaaacacccaggcttgggctggattcccccagaggcagattgtgagctgaggatttgagtgcgaggagtattttgggatgtgattccaggaacctcccagagagaagcagcggggagtcaggcaggaaagaaagcatgcgtcagggagctggttactactgggccaccgaggctccatcccagtaaggaaccctggaagacgggaggaacgcaccttggagttgcttccctaagggatcaacttcagttggtcgccactcaaggctcctcctgaggggagcaggcacagagtccctggcacttctggccctgagtgcccaggggatgagtgcgtgacattgacggcttctgctgtcctctgtctcctgctttccccgtgggatgaactagcttgagaggcacaagattcctgagcaggcagagggactctgtaggagtctcagagctcctgaggctgcaccctcgccctggagccccatgaaatcttcaattttgggttttatgagcttcacaaaccttccaggggcctctccggctccggatggggtgcgttggaggcctggtgcccacgtgtctcctgggccctccacctgtgccccgcctgtttgcacagtgtgcgtgagctgagcacctgagtttgctctttgaatcaagtgtttaactcactcacggtaatagtggctgataattcttgagctaacacaccttctactttgcggcctagccttgtttgcctttcagccctggtttattatcttccatcggatgaagcttaggagcaccagcgctgcctagggaaaccctggcccctccttccctgggatcatctgggtcccccagggctcaggctttacaacccctgctgcttggttacccacctcccacctggggcccctgacagatcaggggacaagcagatagagggctcaccagtgcagtccagtgtatgctgccgggcgggccggagcagagtgagtcagatttggctttttataatcatccaggtgccagggtgggcacgcgtcctgggtcatccttccagcgagggctcacatcatagcctgtcaccagcagtaattcagcaggagggtttagtttcctccctatgggatcagcgagggcagctgtctaagccccaggcacactgcctagggcggacgtgggggtgggggccgtcctcctagggctgccctgcctcttggcaggtgatcagccttcacctccttgtgtggtttaggggggctgcctcctgtctatgtcagagggcttctcagaaacaggcaccgctgtaggggcagcaagatgacttcacttggaaaatggaatgtacttaaacgagatcaagccacctcgtggagaagccattcccttccaatttgttttaatcctgctgattattgcaaagagaaagacttagcctggtgctaatgagtctttaatgcctctgaggacttcctaagttttcctttttttttctaaacaagaaaagttaagcctcaggctgttcatccttctagttggaatttaataaccgtgttttgttttcatagaatttacctttggagttgtttattcatggcagggcctcctggttttccattttggggagtgataggaagttttccattaaattaatttattgtatatatttttttacagtgagtccttaatatattttgtaggtaatagtatgggtgaggttggcaaactatggccctgggctaaatctagtgtatagcatgtttttgtcaataaagctttatcaacacacagccacgcctgtcatttgcatattatattactatggctgctttaatgcagagatgagtagttgcatcagagattgtctggcccacaaaacctgaaatatggaccatctgaccctgtacagaaaaagtgtgctgatctgttatatatggtacatgattggtaataggtattatatcagtgacgttgacagagcaaaaatatggaaggtaatatgcaaataactaaagtaccggaaaatacttggcaaatcccaagaaactaaacagaaattccattgggagggcctttggtaaccacagaaaatttccagcctttcaattgtgtgcctggctgtttgcctgatcactttatcactttgagatactgcactgatgactccatgagctggaattcactgtgttcatatcctttcctggttctgggaggattgtggttgggtacattggcggcataaatacccagtttctccctctctttttctgtctggtcagactttaattttcttctttaacttgggctctagacctatgtctggtttcccacgcagtcctctggtagctctggtttccagttaattccttaattacggtatctacctccaattccgcaagcatttcctgagctaaacgctgagttggagataggcaagtgaaagacatgacctgtccccacggacagcgcacatcgcagggaactcatcaccagcacctcagggagctctcatcactattgtcattgctgccaccaccagcaagaagaagcaactaagccccagttgttatctacagtggaccactaaacacttgcctaaatcaccaggccagcttaacaaaagtggcccactagacaagagaggacagaagaccgggtgccctggcatgtccgtagggcctctgtgctaaccatcccccaggccagaagtgctctcccttgctttctcatggctggatctttctcaatgttccctttgcattttaaacatacaaaagaccttccctgcctacttgatctactaaagtgccatggttactttctattactttactctgtttaatttctcttgcagcacttctcactatctgaagtgatctggtttgttgatcagcttctttatttctgtcttccctgatgtgaatacaagcccgcagcctgtctgctcaagagctgtaccctcagggtgtaaaatagtggctggcacagtgagtgttcactaaatgcttgccaaatgaatacataaaccctgtgggtttttgaaaaaggaactaacatgcaataccaccacttgtgattcttcacagttaaaaaggaaagagaagtttcacctatgagttttatacagggaaaacatgaacaggtttgatcaagagccacaacataaattataaagtcaaaaattaacatcattagagattttttttggcgaattatcatgcctgatggtccttctgcatcactttaattcttaatattgtcatcattgccatgatcaccatcaccatgacagcattgcagtttgaggataataaaatgttaaggaccctagagaatatctggggagaggccttgtcatactcatgaagaaatccgaggtccagaaagatgacatgaattgctaaagcatttttccatgcagtcctctggtaggtctgggttccagttaatccaattgtcaccaccaccaccaccatcaccaccatcacctccatcatcaccattaccaccataatcatcatcaccaccaccatcattatcaccatcaccataaccaccaccatcaccatcaccatcaccaccaccatcatcaccatcaccatcaccatcaccaccaccatcaccaccatcacctccatcatcaccatcaccatcaccaccaccatcaccatcatcagggtcatcactgtcatcacactgtcatcactgtcatcactgtcatcaccaccatcattaccatcatcaccaccatcaggactaccatccacaaatgagccatctttagaatgcctcaatgcttgaaataccctaagggtgccacaagtggttccagatgaaaaactccttaagaacattgggaaccgctatcttgtcatagcaccaacactcttgtgcaacgccccctaggctgaaaacagatcagggtcgtctcctgccaggaagagaaacttcttatggctctgttcaaattccctagaaaaatatctgtggctgaggaagttgtatagtaaattttagtggtttgtacatacaatttctaaaactccctttcccctgttatttatttgcttactctaatttaagcacttaaggaagacccaaaattcagtgagtgagtccccatcaaccaccagaaacagaaaacaggtgtgttgtgctgacagccacatgaccaaggctgggagggctcccctccctgagacgccaagataaacacacccacagcatcgccctggaaatggtggcttacagttcaaatgctcaggaggggataggaaaaaaaaatcaggacagcaccatagagaacaatttccgtcatcaacttctgtgctcctcctaagggcagaggacctgcaaattacaccacagccccttgagtagtttccacaaggaccgatgttgatggggatctagaaaaacaaaggcaagccatgccccagacaagtctccatctcagaagcggaagtccttggcataagccaaccatattggcaaagccctcgctgggtgaaaagtgcaaagcgaggacaaattgatgatgagaaaaccaagtctgaagatttacttggacaagctaaaggcaaggagacagagctggagctgaaaaaagaaatccagtgttaacaggaggtgcccagtgtgttaacggctgttgtccaatatggtagctgctggccacatgtggctactgaaccctgaaatgtggccaatgcaactgagaaactggatttttagtttaatttaattttaatcaacctaaattcaaaaactgatacttgattcagttgttaggaaacttttgaagtatgtttgaaacaactttagaaggtgaatctagcttttcaactgtgaacggagtcttttatggaatttacagtttttaaataactgatgaaatgtacataactttacaaattttccattaacatataacatgcaaattgacatacaaataagtataaaatgcacattggatttcgaagacttggtaccaaaaaataatgtaaactatctcattcgtattttttaatattgttggcctgttgaaatggtaatattttagatgtgctgggttaaggaatatatgttattaaaattatcttcacctacttctttttattttttcatgtggccaatagaaaatttaaaactacatatgcagcttgaattctgtttctattggacagggtggctgcagtcagtcgggagctgacagatacttctggccagagcggctgttgacaccgctcaattgttctggtgtctcctgtcctgtgcccactccccggccaccaccttgggagtaaatgttagctgagaagctgttgctcacccagagaggaagttgggtgtaattagaaaaccgaatcataacttagatattttacagctccctctgttatcatggactctggaacattccacagagtctcaataccctgagtaatttctggggaattctgactctgatcacccaagtaattgggtcagccttggtctgacttctcaaaaccccaaaagtcctatgccctgaatatgccagactctgtggaccagctgatgtaccctgagctgccgcaggaagattctagagtttgagatacataagaatacaatggttttgtaaatctaaaattatttcaaattaaaaagtttattttaaaaaatatgtaacaagtcttgggcctgaagccaacctgaagattcctcattttatgaccccaagatatggcttagtagttcctgaaggagtcattctctagttctctgcctaccaatatggcagccaccagccctgtggggctactgagtgctttctcccttcgggtggagatggatcacatggagatacgccacacatgtgaaatacacaccgaattccaaaggcttagtatggaaaaatcatgcaaaatatcaccttaataatttgtatatactgatcacgtgttgaaatgataatatttcagatatactgggctaagtaaattacattatgaaaattaatttcacctgttcacctgtttcttttcacccttgttagtgtggccactaggaaattcaaaatacacacacagtttgcacttgtggctcaaattccatttcttttttttgagatggagtcttgctctgtcgcccaggctggcgtgcaatggcaccatctcggctcactgcaacctctgcctcccgggttcaagcgattctcctgcctcggcctcccgagtaatttttatatttttagcagagacggagtttcgccacgttagccttgctggtctcaaactcctgacctcaggtgatccacccgcctcggcctcccaaagtgctgggatcacaggtgtgagccactgggcctggcctttttttttttttgagatggagtctcgatctgccgcccaggctggagtgcagtggtgcaacctcagctcactgcaacctccggcccctgggttcaagcgattctcctgcctcaggctcccgagtagctgggactacatgcgtgtgctatcacgcccagctaatttttagcagagacagggtttcaccatgttggccaggctgatctcgaactcctgacctcaggggatctgcctggctcggcctcccaaagggctgggattacaggcgtgagccaccgtgcctggcctcaaattctatttctattggacattgccactccaggacatccttcctccaccctcagaggatgagctgttctcctctgatggacacctcatgagatcctattctgcatctgcccagtgtggccacagacaggtcccacctctgtaagcctcgttctcctcgaggagaggagaatgcctgtaacaggtgagagagcctggaaaatgggtactatagtattgtctatgtcagggggatgctatgaggagtattacctgcaaaacgctcgctgccctgcccacggcatcaaaacccttcagtcaataaatcaaatattatttttcatctctactcccacccttccatccgctcttgagtctgaccctttttcatttacctccaagttttgcttgctttctcaaccctcctccaaaacatcttcccctctttccctacaaaacccttccatcttcaaagatgcttggttcttcccagttcttgaagtaaaacatctctttccttggacttgtctgatgacggactgttcgatttctctccttccctttgcaactcatgcgagtgacccacgtttcctttgtctgcttttgacccgtccactcctttcaggacccctggtcaagccagcctctgcccacagcccgggactgacagcactctccaaaattcaccgggatcttcatctcaccacgcctaaagcccctttacccagtttcagccttcttagctttttaatttttttaaaccaagaacaagaaaacttcaaaatgctcatttaaaagtacttttaattacagcaatccagccctctcccagtgggtccctaggactctgcaccttcctgggatgagtgggtaggaggttgcctgcatttttaatctctaagctctttgcgtttggggagtgaggtcgttcctgtttggaaaggctgttcttatctggatggagccccacctgtttccctggagggcagagttcgctggggagtaacaggagttaaggcctccaggtcctcacaatcttcatgtcacatgagctaagcagtaaacagctctccaggacccaaataaaaaggtctttatggagagaacaaacacaaagaaatgccaggatccaattcaaatgaataaataaacccagttccaaaggctgcaggccacaggatttcggggagactgagccaagcaagttggtttcttgagagttgtttctgaaagggaaggaggaagaaagatttcagggcccgtcagcagatcccagcatctccagacccagatccatgagccatctagaagtgaaagaagtttcccaaccaacaactgtcctaccaaatgttgcgttggaaaatcaaagtgagatgactctcacaggacccgggaacaggggactccaggcatcccgggcctgtgcgggagttggggacctgggagatgctgacaaccaatgcaggctctagcaatcagtgtcttgtgatctcagcaacgctgggtcatctgtcccatgccagcatggggggctggccactctctgtcctggcctctgccactccatccttgtacagcttcacccacctcacccccttctctgatgactttttcttttccccactgtttcttgtactcataatgttcacacaaagcttctcacagccccgcgcctgatggtcccagcactctctgccttctccgtgtccaggtttccgcttcagttatgatgagccaactctctctgtattccttatctgaaatcctgagaatcagattatggcgacagaatctcctggactgctaatcccttctcatgagcatgttgtcagatcttgccctcggcaggagctatgccgccatggccctagccagggagcctgggtccagcaggcaccctgattggacaggctggcacaactttccttctgcaagagacaaagcagctcacccatccattcagtccatcaacattttaaaagtattttttatgtgctgagcgctcaacaaggaaacatgggagaaataaacatcattcttgccttgcaggagctctcagtgtggagagagggacagaatcatgatcagcacctaagacaagacccaaggtacagtgattgagctgggggcaccaggagtgagggttagtcacgtagtagagaccatcaggagcagggctgagtccctagggcaggtcggagtgtagccatagtaagtgtgggggaagagaggatgaaaggcacacacacaaaggtttgttgggcggtatgggtattgctggcccataaaacagagacaagaagtggcaggaaatgagtagaaagggacttggatgccattttaaggacctgggtcagtgcatggcaagtgataagggagccacttcaggattctaagcagaagggtgtcctgtccatcctggcattgaacatgagtcactctgtggagcagggaagttggttaacggagactgccagtggcctctaaatcccctgttcctctccttcctgggctcctccccactccccccaacagactacatttcccagcaccccttgcctctaggcagggtcatgtgattagttccagccaatggatcattagccagagtgatatggccacttccaggtctgggccctaaaagctcctgagagaaactccaagctcttctctgtctcccagctggacacagaggatccagtgaaggatgctgggatggagacacaacatggaagaagcctgggcccctgaaccaccatatggaagaccatcctatgtcagcatgaatgggaaacacattttccctgtgttaagccactttagttttgagattgttattggagcagtgaggactacagcagctgctgttgagagatgataggagcctaaatcagtgggtggaacagattcaagcaattttagggcaataccgtaattatcacttgacaatcaattccatgcaggatgtgacagagaggaaggcacatctagcacaggacaggtggactgagaatttagaaggaagaaagggcttagaaggaaggcaatgagttaatgctcagactcaggggaactgtgagctccagtggagatgtctaggaagcttgggtgagaagtctgcaccgaatgtgtacatagatggtactttgagccaagagagcaatgaaatcccaaaagaagaggcaggtgaggtagaaaaagaagtgacgttagacttggggtccagcacatttgaggggtactcagggctggaggatcccaccgaagagatgaaggaggacgagtccgtgaggtaggagataaccaaggacagtgagcatcatggaagcccagagagaagccaggctgccgcagtccccagggctctgtaacaagtgatcccctcacttcacaagggcaatgtttatttgctgacgtttgttttggtagggctaggtggggacagcctcatctctgctccacttggcctcagccagagtgacttggtggctgacagctggagccacctgaagtcatgcacactgtgggcctgatgtccattgaggggccgaagtccactgaggctcaggccaaatggacagtgatggcctcaggaatgtcagaagacagggggacgaaggccatcggaagtggctctcgctccattctcatcccattagctaaggcaagccttgggctgagcccttcaatggggaagggaaaaaaacactgtccactctcatagtgggcactgccaagtcaccagaaggggtgagcatgtgactgaagcccacaggtgcccttgatggaccagagtggcaaaggtgccccatttccataaaaaaacgctctgtttgtgcactgcagcaaggccgacagtcctggcaggtgaggctacgctacaggcacttcggtgagagcagcagggacggacggcagggagccgcgactcgatccgccgtaaggggtactgtgagcatacattattttcctctgcctggtcaaaacaaagacaaatgcaaattacaagaacattgcagacaacaaaagaaaaatcccggaatccctcgtctctagaagtttacaccttgaagcgttggagtttatgtttggcaaaagctccagcctacttcaccaactagaaacgcatgagttaaaaaggaatgttctctgctgaagcaaaattttgaaaaagtctagaactatccgcccatctcttcaaagcttacctggggtcctgtttcctgacttcaacgcctgtaacagctgagatctctcttccccagccaggacctggtgagtccctggttggctttgctgctctgcagaaacaatggggtgtttttttgagggaaatggagcatctttgctgctgtggtccatcagctgcacccctggttttgacctatggtctggccattcagggggcagcagggttgaggaggggctcaaaataatgacatctgtgtctttgccccagacatccgccaaccacactgggctcttgagagacttggagcaaagtggaagggcagggtgcagagcctgggggctgcccagagggctggggagctggcccaactctgggctccctgaaatcctcagactctttttcaaacagctgggggattgcttaacacccacagtcggtttttccaagttctgctttcttccccttgatttaaccctatatgtagctcggtggaaatttcacctttgcatgggcctgaatgtgcatgcacctgtgtgcacttgtgcatttatgcatgtgggtgcacgtgcacatgggtgcgcgtgcatgtgggtgcacgtgcatgtgggtgcacgtgcatgtgtgagtatgtttgcacacacatagggcaatagtacagagaataggaacttgggaactgggcactgagtctacaaaaattaccagcaataaattcatctcgatttctatcacccactggtacccaacaaggataagttggaatcattttttaaagttgatgctatatcattccatagtgaagaggagggttatggattgaattgcactcctgcccattcatacctcaaagtgctaatccccagcgcctcggaatgtgacctcggttggaaacgaggttgttgcagatgtcattagttaagatcatactggagtagcggggcccctagtctggtatgatcagtttcattataaaagggagaaagtggaacagaggcgcacacacagggagaccctgagggaagactgaattctgctgtcaccagccgaggaagtaccaggagctggagagaggtgtggaacagacccttccctggcaccctgtgagggagcatggccccgctgacacgtggatctcagatgtggagcctccagagctgtgagataataaatttctgttgcttaagctgctccgtgtatggtactttgttacggtggtcctgggagactaacacaggagttatgatgctgtcgatttccaatgacgagtggttaaaaacgcactcctttttggttctttgggatgcattttatatattcttctaagactcgctttcctattttgtttgtttgtaattttgtcagggagatgtaaactaataaacaaatgaacccgcgtttccttaccacgcatgcctgcattcctctttccaaggaataagtctttctttactctcctccaaactgggtgtttcactcacattctccttattgtttccttcgtcacctttttcactctcagcttttattttaggtccagcgggtacatgtgcaggtttgttacgtgagtaaattgcatgtcgctgaggtttagggtgcaaatgatcccgtcacccaggtagtaagcatagtgcccgaagggtagtttttcaacccacatccccctgccaccctcctctgtctagtaaccccagtgtctattgttcccatctttgtgtccatgtgcactcgccgtttagctctcacttataagtgaaaacacccaacatggttttctgttcctgtgttagttcacttaggataatggcctccagctgcctccatgttgctgcaaagaacatgatcttgttcttttttatggctgcgtagtattccatggtgtgtatgtaccacatctttatctagtccaccaatgatgggtatctaggttgattcatgttctttgctgtagtgaatagtgctgggatgaattggtagaacaatttattttcctttgggtatatactccatagcagaatcactggatcgaatggtagatctaagttcctcaagaatctccacactgctttccgtagtggctgaactaatttatgttcccaccaatagtgtgtaagtgctcccttttctctgcagccttgccagcaactgttgttttttgactttttgataataaccgttctgactggtgtgagatgatatctcattttggttttgatttgcatttctttagtgattagtgatgttgagcattttttcctatatttgttggctgcatgtatgtcttcttttgagtagtgtctgttcatgacttttgctcatttgttttttgttttttgttttttttttttgagacagttttactcttgtcacccaggctggagtgcaatggtgcaatctcagctcactgcaacctccgcctcctgggttcaagtgattctcctgcctcagcttcctgagtagctgggattacaggtgtgcaccaccacgcccggctaatttttgtatttttagtagagatgggatttcaccatgtttgccaggctggtctcgaactcctgacctcaggtaatccacccgccttggcctcccaaagtgctgggatgacaggcatgagccgccacacccagcccttttgcccatttttgatggggttgtttcttgtttgttgaattgtttaagttccttgtattctagatattagacctttattggatgcatagtttgtgaatattttctcccattctgtaggttgtctgttcactctgttgatagtttgttttgctgtgcagaagctctttagtttaattaggtccctacttgtgaatttttgtttttgttccttcaacacttaaaaaaaaataacaccaccacccttcctcaccccaatcaagtggggtgtgaggcagtggtcttttttttttgttttttttgagacagtctcgctctgtcgcccaggctggagtgcagtggcgtgatctcggctcactgcaagctccgcctcccaggttcacgccattctcctgcctcagcctcccgagtagctgggactacaggcacctgccactacgcctggctaattttttgtatttttagtagagacagggtttcaccgtgttagccaggatggtcttgatctcctgacctcgtgatccgacttcctcggcctcccaaagtgctgggattacaggcgtgagccactgcgcccggcagcagtggtcttgatagccaagaaagtggttgtctggataagctcccgcagcctcaccatctcagctctgtaatttactagctccaagacttcaggtgagtcactaaacagccagtagcttcagtgtcaccagccgcaaaacagggacaatgacacctcatgagacctgaataaagtagtgcaaataatgcattatatccagaccataagaaaatgaaaaagttgagttttccaagatgcattgaatttgctcattcatttggcaaacgcaatcaagaacctcctcctgcctgtcttgctgtgttctgggtgcggcaatgcaaatgttgatcagaatagtccccacccttaggactttaccatcctgttcttcactagaatgtgattaggcctgggagaattagatgagatggggacttttcagcaatatgtgatagaaatccagctcaaacctactgagacagaaaatgacatttactgactcacttaactgaaaaatccaagggcagatggcttcgggcgtggctggacgtgggtgctcaaacactgttatcaggaattgacccctctccaccccttagttctgctttgcctgactttggtgtccttcttaggtgataaggtggctaccagctgcttctggcttatattgtactcatttagaaaaccagcagtagaatcttttgcccaaaataccaaccaaagtcttatggagtgctcacattggcttggctttggtcatgcccctgtttagtgacccatgcccctatttagtgacccagttatatggccatgggttggaaatgtactgaatggccaggtttggttcacggacccattcatgatgccaggagggaagaatcagcccctctcaagtcagatggattgaatatagaaaagcagtgattcggtcaggtgcggtggctcacgcctggaatcccagccctttgggagactgaggcgggcagatcacaaggtcaggagatcgagaccatcctgactaacatggtgaaaccccgtctctactaaaaatacgaaaaattagccgggtgtggtggtgggcacctgtagtcccagctactaaggaggctgaagcaggaaaatggcatgaacctgggaggcggagctggcagtgagccaagattgcgccactgcactccagcctgggtgacagagcaagactccatctcaaaaaaaaaaaaaaaaaaaacaaaacaaaaagaagagcagtgattccccctaaaaggaaaatatgggaataaatattgagcgggcagaaacaatagatgtctgttacagaaacggggaagggagcaagtgctctgcctaagagaagagtaaagctgctagggaagcttcaggaaggggaaatgaaactgtgttagagttcccccaggataaaaatgggttataaaaggaggaattgcagcagaggaaaatagtttgtgcaaaatacttagacctatgttccctagaggacaagtcattctgtaaaggctagggtaaagctaatctaacagggaacttgatttacttgcttgcggttaagagaacaggctgacatccatagttttgtttcttagattgtatgtttcagttccagaatttctatttgactcttttttatagtttctgtttctctgctgagatttcccatctgtttattcattgtgagtatattttcctttataatactgaatgcaataataatagctgctttaaaatcctcatctgataattccaaagtctggatcatttcaaggttggtctacacaaattgtcttttctcttgaaaagaaaagaaaagacttttttcttgaaaagaaaagaacatgggccccatgtacctggttgtatgtcaaataattttggattgcatcttgggtcttatgaaagttatttgtgaagactttggactctgttatatttctgcaaagagttttgttgtcttgttgttaaacagaggattgagttgcttgggctgaaccttcagactgtctctcttggagtttttagatatgtggagataaaaaggggctggtgacagggagagcaaaggtcattgtcatcctgtttccctgacttgctgccttcctcctgagagacagcatgcccagaagaggaactccctctcgggatacagatctgcttatcctggggagctttaatgtcaaggaaatgtggttcgttaatggctgcagagattgatctctgtgctctctgaagctgtctaatatgctgtgattttcatgtctagccttccacagggcaataagataggtcttagctctcattagcaagctttgtgctttaaagccctaagaaggagctacaaaaatttaatgaaagttgagtgtaaatggtataaccatttgaaaagcattttggcagcatccagcaaagcttaggctgtgcacactctgtaagcctgcagtctctctcctaaatatatcccccagagccatgtctctcaaactcttcagatcatgacccacaggaagaacatctatatcccaatcctgccggcacctatgcatgcagacaccacacctctgaagcaaaagtgccatgacatattacttactatgtgtgatgcatttctaatactgttttttcctattatttttaatgctgggcatggctcaccaaattgatttcaatacttattaatggctacaactctcattttgaaaaatacaacccttgagaaacaaggagacgtggacaagagtattcctgcagcattgttcatgatggaaacaggaaacaacctaagtagccatcaacaggagtatagacaaataaatattcatacaaggggacattacaccgtagtgaaagtggatggactactgcggtgtgtgtcagcgtgaatgaagttagaaattgtaatattaaggccgggtgtggtggctcacacctgtaatcccagcactttgggaggctgaagtgggtggatcacctgaggtcaggagttggagaccagcctggccaacatggtgaaaccccctctctattaaaaatgcaaaaattagcagggtgtggtggtgggcgcctataatcctagctactctggaggctgaggcaggagaattgcttgaacccgagaggcagaggttgcagtgagccaagattgtgccactgcactccagcctgggagacatagcaagactccaactcaaaaaaaaaaagaaaaaaagaaaataaattgtaatattgagtgaaagaagcaagctgtacaagagtagatacagtaagatacagctgaaaacatataatacgtggtgtttggggagattttcatgcctatgtaaacacgtttcaaaaaatgcacgtgaataattaacagcaaattcggggtaactgtaacttttggagggggactggggcttctattgttttgtctggtgaccttttctttcttaacctagtggagagtgtgtggctctttgctgtattactccctaaatctttttgatcatctaaagttcttatttttaaaaaaactctaatgaaagatcacaagattgcaaaactggtgccaacttttctttctcaatattccagctgccaatatgccgttttgcctgcggtttgagtagctcctgccacattccagcccttgtgaactgagaatttgctcaaaccctttgtaaaattttaaattacagacgccgtatagaggaaccagagcgctcagccactgtgaccccacgcccgtctcatgttgcccattataacgtattaatttatatgggaaaatgtgtagcataccccttggccctgggcccataactgagaaagactgccccgaaacacgcagtctttagtgcttttatatatttaatggcctagggaatgaaggagggggtgggatgggggcgtggggcagggaactcaacgatttactctgcccccagcctttttccctcccacaaatgctttccagttctctttttaaaagtttcatggtgaaccagtgaataaataccccatagtgggctggcctttaaaaacaacaaaactaggctactgtggaataaattattgccttagcagctaagacacctgagggaggggaaaaaagaatgtgtgtatgtaattgagtgtcgttggagagcaaattaaggtggtgtgtgtcttgttacttaatggcccagcttaggagggttctggaaggtttccaaaaacaggaaatcaggccccactaatgtgcatgaagaaagctgagagggtcagtggaggatgcaggcaccccgcagccgacggcagaccgaggcaggaagcccgtctcacctttacctggctttcttgtgccagcgagggtgacgtccaggaatgccacggttcccctgtgaaactgcttcgtctcattagggaacacctgagtgccggcctgtcctaccagaaatccaatttggtgatctgtctgccaggtgtgtgatcctggagttctccaccctctaaggcctcactggcacaggcacagaacccgagaacctgggttgtcttctcaggtggctgagagaaacacaggcaagtgcttgatcatgacaggacgttcacatcagcctaagctctgtgcccctaggacgtacaagaggcagggatccctgagaaagaaaaggggagactgacagtgcagaatatagaaatgacaaagagaggagacagactgcttaggtgcgaggttcggcccggaggataaccttggccaagggtaaatttgcatattccctgaacacgacaagcctccattcccgaatctgcacggggtcgggggaaatgatagtagctgtctcatgaaatgaacaaggatgaaggggaactcccagagcaagccctcagccaagcacctggctactctgagtgctccagaaacacccgctttatcattgttggaagggaacagagcggaccctacaactggggagggtgtggctggccgcaggatgggcaggtagcaagcagcccacaccgcagtctctggcctgctgaaggagtgggcaccatttttctctgcatcctctttctgtaaaaggcggggcagcaccaggcagatgctcagtgcatctcgctcaaggcccattccagagtttacctgccaggggaatcgaattccctgaacaacataaaaccgacttctagctgtttctttccgcaaacccttcacccctggagtggacttatgaatgcagcgtgtttttattttccctaacttagcagcccgtttttgtcctctgtttcttcctccacattgttcctggtagacaggagaacaaagttaaaaagacccacaatatgaaatgtcaccaaggatgggagcagccgcaacggaacatttacttgttgctgtttggggtgcaaagtgatgtaacccagcaatcccactgctgggtatttccccaaaagaaatgaaagctcatcacacaaaggcttatgcctttactcgtaacggctccaccctggaaaaaaaatcccacttccccatcagtagagacatacgcataataaaatgtattcgttgaggccggtggctcacgcctgtaatcccagcactttgggaggccgaggcgggtggatcacctgaggtcaggagttcgagactagcctggccaattgtggtgaaaccccgtctctactaaaaatacaaaaaattagacaggtatggtggtgggtgcctgtaattccagctactctggaggctgagtgaggcaggggaatcgcttgaacccaggaggcagaggttgcagtgagccgaggtcacgccactgcactccagcctgggcaacaagagcgaaactccatctcaaaaaaaaaaaaagtatttattgtttatctgaaattcaaagttaattgagtgtcctgcattctctggcaaccctgtttgtgaggaactcacagaatagctgcagggaggcggtggtgggatccacagcaacacgtgaaacataaatacacagtaacaaacatgaaatatacaataatagagacatggtaccgtttgctgagaagttactatgtgcagagggtctagtggttaagaacagaggctgcttaggttggaatcccagccctgctactttcaaactgtgtgatcattttgtgcctttgtctccttatccgtaaaatgggtgtaaaaattgtacctacgtcctagggccaggtatcgtggctcacgcctgtaatcccagcactttgggaggctgaggcgggaggatcacttgagaccaggatttgagaccagcctgggcaacatggtgagacactgtctctaccaaaaaaataaaacagaaacaaatatgccaggcatggtggcacgcacctatagccctagctactcaggaggctgaggcaggaggattgcttgagcccaggagtttgagactggcctgggcaatatagtaagatcctatttctaccaaaaataaaataaaataaaataaatagtacctatatcataggactgctctgaggtttaaatgagtgacaggtataaagcacttggaatagtgcctgacacataaaaagtgctcagaaaatttagctttttatagcagcaggttcatattagctaaagaaaattgctgtaaattaaaaagttgtttcaggctgggcacggcgattcacacctgtaatcctagcactttgggagggtgaggcaggtggatcgcttgaactcaggagttagagaccagcttgggcaacatggtgaaaccccatctctacaaaaaatacaaaaattagccagatgtggtggcattcgcttgtagtcccagctacttgggaggctgagatgggaggatcgcttgaacctgggaggcagaggttgcagtgagccgaggtcacgccactgcactccagcctgggcaacaagagtgaaactccgtctcaaaaaaaaaaagtttcttcagatgaattcacctaaactaggggccaagtttaatggagaacagttggggaggaaggttttgcctgagattttatgttgaaaaatgaaacaaggttataaacatttatcagatgacaattgcaataatgtactaagccttaaaattcacaaaagaataactcaacaaggttttgggaggtgtcatttttctggcaaaattatgaagtaccgtaagagaatgtcctttcttttggcaactcccatggccaggccttaaagcagttcccttctgaggaagtggcccaggacgacacgtatcccctggtgggctcctgaggccaccgcagcagcagcaccttatcaattttctcctcaattgtcaaccattctccctcattgacccacctttgccggtggcttccagtggaaatcaggccattttccaacactgctttcaccaacttcttgaaatcgacatttttgcccagatttgttgttcccttatgcagccttttttacaaggtttctgcgttgcttggttggcttttggagacatgggtaagaaagtgaccataagatgagtggacaatgaataacaggatgacgttgagttaccactgggcccagcgtttccactgctaggtttatgcccaagagaattgaaaatgaaggactcaaacaagcaaaaacacatccaagcagcaccattcacagcagcctgaaggtgaatacagtccatctgctgaagaatggaaacgcaaattgtggtctgtctctttagtggagtattattctgcaatgaaaaaggaatgaggctgggtgtggtggcacatgcctgtgatcccagcactttgggaggccgaggggggtggatcgcttaaggccaggagtttgagaccagcctgggcaacatattgagacatgatctctacaaaataaaaataaaaataaacaaatacgccaggcatggtggcatgtacctgtagtcctagctacttaggaggctgaggcaggaggatcacctgaacctaggagttcaaggctgcagtgagctatgatcacaccactgcactctagcctgggtgacagagcgagactgtctctaaaaagaaaaggagtgaaggattgatgcctgctacacggtggatggacgtcagaaacatcgtgctaagtggaagaagtccaatgcaaaggaccctgtattgcctgattccatgtatacaaaatgtccagaataggcaaattcgtggagagcagatgtggttgcaggggctgggggaagagggaaaggggagtggctgctggcagctacggggttttctttggggtggaaaatgttctgaacctagacagaggtggcggttgcacaacattgtaaatgccactgaattgttcacctttaaatggccaattttgttatgtgaatttcatcccaattgaaaaaacaaataacagaatggtcaagtggggcctcgtttgacaagaggacagtacattggtgaacgtgttcttgggatgataacatttgcgcctcaccttggaagacggggagcaagcaatgggggctgaaacaacgaggacccttgtcttccacgttggcccctgggagcttctcagccaagtctggctctggatggaccccaagatgagtccagaatccaggaaggttgtggacctaacagggccacgcggtagcccagatttcatggggtctgggcttgggctgtggctgtggatgggactggcctccacgtggcctcttgtcctcctcctgtgagttcaggtgggcgtggggggtgcccagattggggactgccacatttgctctttcctatgagggagggacaggacgctgaatcctgtcacatctcctgatgggcttggtggcctcagggatccggaagcaggctgcaagggagcaaagacacccggggagcagatgagaaagactcggacgggagccaggagcctgaactgcagccgcaggcaaagctgtgctgacactgggctccgtcctcatcagccatgtggcctggggcaggtcctttagcctccagcccctcagtggctgcacctgtgacatgggcacggtagcagcaccaagctcctccaggtgtcgtgagggttcagtgaagtaaggtttgcaaagcactcagcctcagagttattactgttgtcactgttgccattgctcctttacaacctcaggtgccacacactaaggaatgaaggccttttcggaaccatttttgacctgaaaagtccacagaagctgccatcagcctcctgcgtccgcacatgtcagacttaaagaagggagcggtgcagatggagcccggtgcttgctcattttccactccagcctgaaaaagctcaagtgtgcaagcaattacaggcgagaggaaaagaccatccactccctagactaagagaggaagcaattagggagacggttgccgaggtgttggcagagagagccccagagaagggcggggcagctgttggagctgaaagaggagggatactgaggctggcagctgtccttggaagctggtctgcaggggctggtcagggagggaggaggagggaggggaccctacttcagcagtttggaggcaccccaggaaggtgaaaggccggataccttgcatggggactcgaaacctgggggctaagaactcagatgaggggaaaatcctctatcttcattttcgccaggctctaatgcgttcccttctactacaaatgcaggcaacaaaccatgataattaacggaaactgggacttcattcctcatttaaaagaaaatcagagatattttcatgtcatgttacagctgttgcaactacgtcaaactatcatttactcttcttgcttcttcaaagttacaaaagttccaggcctgacaatagagtgtgttcttgaatgcatgtataaagaagcccgtgtgaggccaggcgtggtggctcatgcctataatcctagcactttgggaggccaaggtgggaggatcacttgaggccaggagtctgagacctgcctgggtaacatacagagattccgtctctataaaaaatttaaaaattacctggtcatggtagtgcgcacttatagtcccagctacttgggaggttgaggagggaggatcacttgagcccaggaggtcgaggctgcagtgggtatgattgtgccactgcactctagcctgggccacagagcaaaaccctgtctctaaaaaaatttcttttaataattaaaaaaaagcccatggcattatgatattagaaacctgtttaatattgtgataactgttttagttcagtgggttttctttctgcaaacctaggtattttatgctacacgtttaaagacattattctgaagaggggtccacaggcttcatcaaactgtcaaaggggtcagtggcacaaaaaaaaggacaactgctccccaccaccttaagtcatgatggagtgggtgtttattcagtttcatcttggctttttcttggtgtgaatgaagtttgtggaaaacatacaagaggctggaatggggagaccctttaaagctgtgggtgtcagccctggctatattgggacacccaggccacaccccagacttggcaaaaaggaatgtccggtgtcccactgccccagccacaagggctgccctgcaaatcctgaacacagcaagctccttcctgccctcgggacctcttactgttcccgccgacaggaaagtgcttttcccagatgtgggctgccttgctcgctggttgttttttgtttctttgtttttttgagacagggtcttgctctgttgcccaggctggagtgcagtggcacgatcaccactcactgcagtctcgacctctcaggctccagcaatcctcactcttcatctcccatccccctccccaggtaaccacctatctgtcctcccaggctcaagcaatcctcactcttcatctcccatccccctccccaggtaaccacccatctgtcttcgtctgtaggatttacctgttctggacatttcatataaacagagtcatatggtgcatatgctacatggccctttatgtctggcttctttcactcactcagcatcatgtttccaaggttcatcatcatagcacggatcagggcttcattccctttgtggctgatgatgctccactgtgtggaacatttatttgggctgcttcagtgtccaaggatcttagcgggagaaaatcccagatacttaatccacaagctcaggaatgtcaggggtaagtccttctggaacattcatctaattgtcagtgggctcaaggtggagttagctcaacctgttggcatagaccacagcctccaagtgtccaagaggcacacgattagaaagttggacctgtgaatggcactgactgtgggacatgtttgtcccttacgagaggccactggagtgagtctgtaagaggaaatccctcctgttcaagcaggataccttccaccggagcctgcagggagaatgagctagtgagacctcaatcatggaggctctcatctcgtggcctcagtcacaacacgcccagaatgtcaactccacacctttgctgccgctctgatcttcccccgagaaccgggtctgtttcccagcacagcgatcagatcccatcccctgcagcctcctcacagcctgtgagtcccaaatgtacctcagagtcttcccaccccaaaagcgtctaggtcttgacaccacagtccccttgtggcccaggctggaaaactgtagctatgctttcttctttttcctccttcccagattcctcctttagtaggtcaccgagtcttgttctgaaggcagaatcactatctttggatctgttctttctcttctgttcccatcctctctgggtccagcccttcattctctcacctgcactcttttttcttttttcttttccttttcttttttttttcttttttttttcttttttgagagggagtctcactctgttgcccaggctggagtgcagtggcaagatttcagctcactgcaacctctgcctcctgggttcaagagattctcctgcctcagcctcctgagtagctgggattacaggcatgcatcaccatgtccagctaatttttgtatgtttagtagagaccaggtttcgccatgttggccaggctggtatcaaactcctgacctcaggtgatccactcacctcggcctcccagagtgctgggattgcaggtgtgagcctctgtgcccagcctcgcctacactctttttgcagaatcctcaatgtcttccttatctcctgccttggaccaattcctcctctctgctgcaaatttaatagtctggacttaaggatagctttttttttttttttttggtttgtttgcttgtttgttttttaatgtaaaggacaaaaaaaagagtcaccaacttttactaacattttattttgccaactaaacatgccataaaaaagaatgactgaactgtatctacaatgcctgccacttaatgaaaagagatgattacacaaaatgcattgtaacccgtcccagatgaaacccatcaaacccagcaaaacctcttgacgtccttctttgtctcacttcacctgaggctgaacaacctttgcccagtactgaggaatgatgggcatttggagccacgggcgcatggaatatgatccaaactccagcatcactcccaagacagctgcctgtgtgagaagagatgaagaataagaggataagagaaaaagctaaagtgacattaaaaaaagagagagagaagggccaggcgcggtggctcacgcctgtaatcccagcactttgggaggcggaggtgggcagatcacttgaggtcaggcattcaagaccagcctggccaacatggggaaaccctgtctctactaaaaataaaaaaaaattagctgggcgtgatggcgggcgcctgtattcccagctactcgggaggttgaggcaggagaatcgcttgaacccgagggcggaggttgcagtcagccgagatcgcaccattgcactccagcctgtgtgacaagagcaagactctgtctcaaaaaaaaaaaaaaaaaacccaaaagagagagagagaaggagagagttgaaaggggagggagcaagaaaaaaagagagagagagagcgcgctgggtaagggatgaggaagtcataaggaaactaatgctatgagatgaagtgatgtttggacgcagaagaaaaccaagtgcgtgagagcagagagcaagactaaggctctgcccaggttgcaggaggaaagagaaaccgatgaacacagaatgaatgaatgacattcacgacagtgtctttgtaactggagaaagtatgactgccaacaaaaacaatacaccaaacattgtgatggaaagaaaatctcgtcctgttttaaagatgaaaacggtattagaaattcacagcttgcgcgcgcacacacacacacacacacacacacacacacacacacacacacacggaacaggcagcagaggaatgggagatagttcaatgtcattgatctcactttacacagatacgatttcattcctgaccttgatcatgacagagaggcttgaatgtttcgtacttaaagcctcgtgttcgacaaaaaaccatttgacatccttagagggaaaaggaagaaaatagtttccacatatagagagtactaaatagcggagattgcaaagagaactaaaacacaacagaaaacaagatgagagaaggaacacttagcggattagttaggaaaataaataaaaatggattaaacggcacaaagatgaactctagcacaaatgggaaaatccaacatccaactacgtgccttatagaaggaacatgcctaaaatgaggtgacaccgaaatacagggagggacaaaaaaatgcgtctggccgctgcagaagggaaaacaagacggacagatactgagggagataagtgaatacgtcatcaatcagtaaagccaatgaagcattcagcttttcagaagacggagactttgaaggaaaaggcgtcagatggatcattctgtattgataaaatcactttgccccaaataattcagccttgatagatgcagaagacataggctgaaacccacttgaaaatctgatcttcatccctctctctctctccctccacccagcacatgtctgagtccttagctctgacagtgaactttatattttttcacaagtctttaactcaaagatttttttctctctctctctttccaaggaacttctattcagaaaccattccaggcacttggaattcggaatctaaatatccctgacgcagccccaggccctaactgccccccgcccctccccggccgcctgccacggccgtcatatcttattttttcttaccatctgtcctcaccgctcagtcctaattccccgagctgcttgccctcttcctgccccaggcatattgtgcttattcacgaagccggagctttctctggagataagaaataagttcatccttcctgttcaccgttcaaccacacacaccctctggggattcgagaatgctgaagtgttaagcaatacagttgtcaaagtggctttcctttcatggtagccaaaaagtggaaataactcatgcatccatcgatgattgaatggatgagctgtggtccagccacacaattgaatattattcagccataaaaaggaacgaggttctcacacatgctacaacatggatgaaccttgacagcatcatgcttagggagagaacccagacacatattgtattgttccatttctatgaaacacccagaatacataaatccatagagacaatacagaacccagaaagcagaacccagcggagatggagtttcatggtgacagagtttccgtttggaatgatgaaaaagttctggaaatagtggtgatggttgcacagcattgtgaatgttcttaatgccactgaatcgtacacttaaaaatggattaaaaggcacattttatgtcacttatattttactacaatttttaaaaatgggaaaaaagagaccaggtgtggtggcttatgcctgtaaccccagcactttggaaggctgaggcgggcagatcacttgaggtcaggagtttgagaccagcctgggcaacatggtgaaaccccgtctctactaaaaatacaaaaattagccgggcgtggtggtgggtgcctgtaatcccagctacttgggaggctgaggcaggagaatcacttgaacctgggaggcggaggttgcagtgggcctgcgccactgcactccagcctgggcgacagagtgaggattcttctcaaaagaaagaaaagaaagaaagaaagaaaaagtggctttcctcccctcagcatgtggaaatccccctttctaagggctggggctccgattacgtgcaggtggaataatgcaggattttacagtgggcaggactctagtgccctgagttttgcttttccatggagtctggagacagtggccctccacgatggaccgttaacttcagtgactgggattctcccctgtcatagctgcctgtccacggggatgaggggtcatcacaaagtatctcagacgctgcactaatttcccgtggctgctgtaacaggtgcctcaaactgggtggcttaaagcaacagtgacttattctctcacggttctggaggccaggagtctgaagtcgaggtgtaggcagggccctctgagaccctggggagagtcctctgcctttccagctcctggtggtgccagcgttctgggacattcctgggcttgtggccatgtcgccctgatctctgcctccgcagttgcactggcttccctgtgtgatctctcctcttctttttttttttttgagacggagtcttactctgtcaccaggctagagtgcagtggcacaatgtcgtctcactgtaacctctgcctcccgggttcaagtgattctcctgcctcagcctcccgagtagctgggattacaggcgcccaccaccacgctcagctaatttttgtattttcagtagagacggggtttcaccatgttggccaggatggtctcgatctcctgacctcatgatccgcctgcctcggcctcccaaagtgctgggattacaggtgtgagccaccgcgcctggcctctcctcttcttacaaggacatcagtcatcttggattaggttccctctcctgacctcagctgaacttgatctcatctgcagagaccctctttctacaaggtactgtccacaggtcccagggtgaggatttgaacatatcttttggggggacacagtcagcccagagcaggtgtttcctggaaagtgtgtggttccctctcggcttatgaagggagtatgagccatatctgggttgataatgggctttgctgttctcagaggcaaaggcataactctctctgggagtactgcttttcctggggggattccgtcagaacggagctggcctggggatcaggcagtgggatccccaggccggccccgagccatgcatttctctcctgggggtccgctggctccggggcagaacacaggcctgtgtggtcagctgagctgggccctgggggccagggagacctcactcacgcctggcctgccttccaggcagaggaacgcggagcagagaggacctctgtccctcacacacccctcaccgggcccggggggcatgtgctgccccagaccgagcagaactggttcacaacaaggctcccagaatgaccctggggccacagcggctgctgctctgctaggggtgcgtggagtttggttggtgtccacctacttggctcaggtgtctccagagggccccaacttcctccctgcctggcttgggtctaaaagaaaacaccagaagttttcaggcaccctggctcagcagccgcgaaccaggcctggcccctcagctgaccacactgggcctctgctccctggaggccaagttgagagactctcccaagagtggaggccactccctttagcccctcgcagaagttgctgcctcctgctctactggtgtgactgcctggctctgtcttcctttccctcctccacctcagaatctctctccagcctccaaatatccccttcctcaccccatcggttaggtgagcaggccatggccaggctgctggtgcaattccattccatctttagccagctgtgtggccttgggtgacaagctcgacctctctgtgccttggtttccctgtctctaaagtggggccacagtgccatggccgagcagcacgccttagaaagagcttctctctggagatgtattttctttctttctttctttctttctttctttctttctttctttctttctttctttctttcttttctttcttcctttctttctttcttttctttctttctctctctctctctttctttctctctctttctttcctttctttttctttctttcttttctttctctctctctctctttctctctctctctttctttctttcctttctttctttctctctctctctttctctctttctttctttcttttttttttttttttgacagagtctcactctgttacccaggctggagtgcagtggtacaatctcagctcattgcaacctccgcgtcccaggttcaagtgattcttgtgcctcgtagctgggattacaggtgcacgccaccacgtccagctaatttttgtatttttggtagagacaggttttcaccatgttgcccaggctggtcttgaacccctggcctcaagtgatcctcccaccttggcctcccaaagcgctgggtgggattgcaggtgtgtgccactgcgcccagtctgaagatgtattctcttgcacctcaagttctctcctgcccttctctctccatgtcctaattccttcagctcttcacttggtcactcattcactcaacaaacgtttgtcaagcattcgcctcatgtcaggcggtaaagctccaggtgataaagatacagagatgcccccgccacctaggccccacctttgtgaaacccacagctgtgtagaggacaatttcagagcctcgcctatccctggggatcgctgccccatacccaccggcgtctccctgcgcctggtgtccccgtcccctggcccctcgaattctcctggtctccatgaccaggaagagaccccaccccccactctggttccctgtttctcagcccataaggaagtttcttccatgcagtggggtccactcagggggaccaggggcttgcctcaggggcccctccctggcccctttgtggtcctgccatattcttcatctccttccagaagcttcttgccgttgtctttcgggacacggctctcctcttctgacctctaaacttgccctctttgcgatctcagccatttctggggctgacctcccatagggctggccctggctgcgtggagactgaagtgactccaaagctaatttgcctggtgcctcactgagcaaaaagcccttccttctagaagctttctttcgtcttcccaacggtcctcggggagactgacttaccgaagatcaaatgtggcaggggttcttacacatgagtgtgcatcagaattcccagagggcctgtgcaaacacagatcctgcccccgccccgacaggccttggtggggcctgagaatctgtatctctagcaagttctcagaggttgctgatgttgaaataagtgctaggtgaatggcactgcaaggtaaacctggtcttcctaactccaccatgtcagtgacactaagcttgttccactgggcatcacgggggtgcttgatcagccatggacttccagctccatccctggagattctaactcagttggccttgggaggggcccgggggactgtgtttctcatcagctccttgggtgattcttgacatcgggcaagtttgggaactgcccagtgtcattgccaggagcatgccaggcccctccacctggaagtcgtctggtcccctaagcttcggatttccaagccaagctcatgctcttgtttcttgaagccttgcatatcttcctctgcctgtgcctccccattcgcccagttccctggctccagatctcagcccctgcttctccccaccacaccacatggggtcagttgccaacatgtatccacaatcttacccaagtacatctcccatccacttcctcctttttttttcagacagagtctcactgtgttgcccagcctggagtgcagtggtgaaatctcggctcactgcaacctccacctctcgggttcaagcaattctctgtcttagcctcccgagtagctgggatttcaggtgccccccaccatgcccagctgatttttgtattttcagtagagacggggtttcaccatcttggccaggctggtcttgaactcctgacctcaggtgatccacctgcctcggcctcccaagctgctgggattacaggcgtgatcccgccgtgcccggccttcctcctttttattcttgctctgtcgtcttgggtcaggcctttatcagttattgctaggactagtgcagtagcctctaaccaactctcttcacttcagtaccaccccctccagtccattctctctactgttgcctcccttaaccccctgcatgctgcaccctgggtgcaggcccagccccagctcaaagggcacaaggccagagtgtggcccgacagcccagggaacagcaggtcctccactggagactagtgtatgacccaatgcccagcaagagcagggtctggaaacgaaggtgtgctccgctctgggctctgagtgggggctttcctccaaaggtgggacaggggcttggattctgtgaaaggggccacactcacttcctcagagcagcccagagcagacatccccaccctgactctgcagtggtgacccctgtgttcccagctcacttgaaaacaaaataatttttattttaagaaatacaggactggtgtacttgcatggggagagagtgtggatgctcctcaagctagcgaggagggctcggtggctcctgagaggctggtacctgctggtggctgtttggtcacctgtgtgctgccctggggtttcctgatgtcataaacatgggagggtgctttctcatccaggcctcctgggctgggttctggatgattccgtaggtgctttagtcacagtgttgggacaccagacgccgaagacagtctccttgtaaacatgcccgagggtctgaatgacatggagcatcagacagtcttgggagaccctcggccccaggggacagactcagagcaagcacctcttcacaggtgacaagccgcaccatttatggcaccctggccaagcatcagacactgttctggggcttacacatattggaaatcaatttgtccccacagtggcccaaggaggcaggcatggaaaatgacacccattttagagataaggaaaccgaggacagaacggttaggtaacttgcccaacaacacacagagagtaagtcatagatatgaggttcaaaaccaggcagtctaggagcccaggcatgtaaccactgcactgtgtggcctgtctaccagtaatactggaactttcccactgaagaagacacagagaactgtaccctcctacacagacaaacaaacctgcaaacacacacactaataaaatattcctaccttaggcaacctacatcgcaggggcccagagagttcgttgctgctgtttgctttctcatttcattttaaaatagtttaaaactcacaggaagtcacaaaaatagcagagttcccttaccccagctcccgccagtgacagcacctttcctgcccactgcccattgtccaaatcaggaaattgacatggctcaatattattaactgaaatacaggtcttatttggatttcaccaaagagccaaaagaagtgaaagtgtgattgaatagctcaggctgttggttggaactcaccaaatgttaggagccagaaggattttaagacgcaccgcctctgtgtccatcctcttacagaacatcgtggtgagggtggagtgttgggaacacaggtgagacacggtgcctctgaggatcctggattccactgccgggtgtggagggaccatgcggccctgagggtctcaggacattgggaacttgctcaggatttcagtccagaacctcctgcttctccgtctgtccatagcatcccaaaagccatggagtaagagtggggaccaggaggcgggaagtgggggtggtcattggctttgctgcaggtgtgggtccagccgctcggggcttcccctgctccaggtgggaggctgctgtgaacacacacaacagcagcgagaaggagctccccgagagaacagttgtgtcttggcggtgtcctcgaaaataaatctcgaaagtgcttttcaagaatggaggtgtcatttgcacacagatccatgaaatgcgcagattttatgtgtacaacttatggggatttgagaaaagtatacgcctgggtaaataacaccctaatcgagatttagaaccgtccatcgttgcctgcctcttctaaatcatccctccaggtgtaaccactatgcggacctttgtagaatttcccataaatagaatcacagcgggttcccttttgtgtctggttcccttcatcatcgtcggacacgtgaggcgccccacgctgttgggtatatcaacactcagttcatcattactgttcactgcacttcttagtacaattacaccacggtatgtttatccactcatctgttgatggatatttcggctgtttccaggttcaagctgttgcaaagaaagcttctatgagcattcatgcacagatctttgtgtggacataggtgttcatttctctcgagtaaattcgtctaatggattctcctggggacaaggcaaaggtaaaagctaaccctaattctaacactgaccctaatcctaaccccaaccctaaccctgagcctaaccataccactagccctacccttaaccctacccctaacactaaccttaaccccaaccctaatcctaacccctaaccctaatcctaacccctaaccctaaccccaaccccaaccctaaccctaaccccaactctaaccctagcaaaagtacgtttaactttgattaataaaaaagagactccagccttttactaactaggctatgacagaaactcataatttaaaatagcctagaaagcatttgttttttgtctttaggatgcaggttctgatattttgggggtagattcattaccctatgtgaccagttatattggttctcaatcaattgagacccacctaccagttaaaggtgaggagaagattttcatgtggggaaaagctaacctggaatttaaaatgtgtatttatggcccagagatgggagagctagagagtacctaaaaggtcactgtgatggattaagagtctccttgactcaaattcaagtctaccctaaacctcagactgtgaccatgtttggaaatagagtgtgcaggtgtgatcagttaaggtgaggttgtactggagtaggatgggccctaaatccaattctattctcatggagttcctgggattgttgctgtagcccagcccctctgggcaccagggtcccaggaatggtacaggtgaagcgcagcctatatagcttatcccagagaaacagaaataatttgttctaaatagaatctgacaagcaagagctcagctttccttaaatcgttacccatcatattgcttcctaagacactggattgagtttccgaagccaagtggaggccctgacagttgggaagtcaagcttctggggatgggacaggagcctcctatgaccccagacgagagaagagttgaaacctggcctttcctaatgtgttgggcaagaccaagctttattttacctgtttcagcaaaaactctcatgagaaagtcctgaaggtcctcccaagcccccatcttaactcagggtccacattttcaccttcatggcaggatgtttctcctctaaaggaacttctaatacttttccccttgtaaacatcttcagagggccgccctaatttgtgtattatgttggtgcatgtctttgttgatatttcttccaatggtgtgtctgtggctctgtcctgcggtggagggttagttcagatctctttgagtcatccagtgataatatcaatagcaacaatggcaaacacttatggagagctttccttggtaatggctcctgtattagtccgttctcacattgctataaagacactacctgagactgggtagtggtaatttacaaagcaaagagatttgattgactcacagttctgcatggctgtggaggcctcaggatacttacaatcatggcgggaggtgaaggggaagcaggcaccttcttcacaaggtggcaggagagagggagggggaactgccaaacacttttaaaccatcagatctcatgagaactcactcagtatcacaagaacagtatggaggaaactgtcctcatgatccaatcacattctaccagatccctcccttgacacatggggattacaattttagatgagatttgggtggggacacagagccaaaccatatcagctcccgtcatccccactaataccctcctctcccaaaccaccccagtcaatctaactaacaatagtgggcttgctatggaacagcccctgcagatgtccatgttctaatcccagaccctgagtctatgttaccttccatggcaaaggggacactgcggatgggagtaagccaaggatcctcagatgggaagattctcctggagtatctggggtggcccgatgtcatcacaaacatccttagaagtgacagtgggagacaggagggtctgagtcagagagagcctggggaatgccatgctgctggctttgaagacagaggaaggggccaagagccaaggaacacaggcagcctctggaagctggaaaagtcaaggaatggatgttccccaaaagcctccaccaggaacacagccccgcggcgcctggattttaggcccatttcccacttctgacctcccgaatgatgagagaataaatgtgtggcttagcggctttaagccactacgtttatgggaatttggaacagtagccacaggaagctcatcccttatgcaaacccaacttgcagatgagtccctcggtcccttttcctgacagctgcccctaaccctcatccacacagatcctagacccaccgctcctcccatgtgtcaggaatgtaaccgagcgtttcgattccttctcttttcatcttcatacctgtcttaggtattttagttattgttcccattgacagataaaggaatttggcccaggaactttgactctctccaaagaggaagccacctttctagtctcaggtagactccctgagtcatggccactgggaatctttggtctgggggcctgagatctgaaatcaaggtgagatccccagaccttggaatgcatctttctcctccagccccatgcccagaacgtgctgaatttctccttccagatgcagtgtggccccagctaaccatgttcctcccttggtttctccatctcatgtgcgcatgtctgaattctagcacctacaccaggctatacatctttctgtacacactcaggctttaccaccagagtgtgaggctttggagggggaaacatgctttgtcattcactccacattcaacacgtattcactgagcactttctgtgtgccaagtactattctaggtgctggggatagagtagtgggcaggacagacaaagatccctgccctggagttcaagaccagcctggccaacgtggtgaaaccccatctctactaaaaatacaaaaatcagccagacgtggtggtgggcacctgtcattcctgctactctggaggctgaggcaggagaatcgcttgaacctgggaggcggaggttgcagtgagccaagatcatgccagtgcactccagcctgggcgacaagagcgaaactctgggaaaaaaaaaacaaaacaaaaccctgcccttggggagtttatgtgctgacagggtaaacagacagtcagtagcaaacacagtaaataagtcaattatagaatctgctagaaggtagaagttgcatgggatcaaacagagaagaacaaggtgggcaggcaggccaagtgagggtgggggagatgagttgaaatgcagatagagtgggccatagtccttcctgagatgtgcagagacttgagagaagtgaggaaacaagacatgcagagatctgggggaaagtgtcccggcagggagaagatgagtgtaaagcctggggcaggagcgagcttggtgtatcccaggactagcaggagggcctgggtggctagggcaggttgggcggaggagagagcactgcctgggtcagagtgaaggacgagggtggagctgggccttgcagggccttagaggggcgttgcaatgactttgatgtcaactccgagtgaaacagtcccatcccagcaccagtgtaagcccaggcccctcaccacctggcaaatatttaagtagataaagaagtgccccagcaaatagagcattcacaacatgcaaaattgttagcctgaaaggaggggaaggctacgagagacggaggtctctttcttttcctgcttttcctggtccttttcacaggacttgctaaggttgttgggacaaatcaccatgacaaggaggcctgaagcaacagaagttcattgtctcacagttctggaagccagaggctgaaattgaggggtccacagggccacactccctccgaagttctctacggaataatctgtcccgggcctctagcccagcttccggtggttgctggcaatctctgccgttgcttggctggtagctgcgccactccaatctctgcctctgtcttcatgtggtgtccctcgtgtgtctgtattctctcctcttcatcttcttcttcttcttccttttttttttgacaggatcttgctgttttgcccaggctggtgtgcaatggtaggatctctgctcactgcaacctctgcatccctggactcaaacgatcctcctgcctcagcctcccaagtagctgggactataggcatgtaccaccacacctggctaatttttgtattttttgtagagacagggttgcaccacgttgcccaggctggtctcaaactcctgaactcaagtgatccacctgccttggggtcccaaagtgctgggattacactctcctcttcttgtaaggacagtccttgatcagggcccacctaacccagtacgacctcctcttcacttcatcacatctgcaaaaatcctctttccaagttaagtcacattcgtgggtacctgaagctaggacttgagtatatctttaggggacaccatttaatccactccagagcccttatttgcctgtcatttgtccctgtgtgtgttcctgtgtatgtgtgcatgtgtgtgtgtgtattaactcacgggagttcacctcactgtcacgtccttcagcacgtaatagggctgtgtttctcaaacaccccaggcacaaaagctcaccctcaaatgatgtatgtgcaggctgccagcagcatcacaaaaccgtgtatctgagtcttctcccagaatgagcctggaacgagactccccgagtctgagagccacggctcagggcttttttttgctcatttccttcctgggagacaccaagtcaacatgctggggtgcccttgtcctcgggcagggctgagagaatatcgttcaagagctccaaatgtctcactctccccaccagctccacaaaagggggattcagagctccggtgggaagcagacaggtggagcatgtaaggggctgtctgctgagaagaatgtggcaattcatcctgaggatccgtgagctggctggggcagtggaaattgggcccgatctgcagagtggcccagaggggcagggaagctggcatgggttacccagagcctccaggacatcatcccccttgggaggaggcagactagcctggaccagggctcactgtagaataaagtgaatggtgtcccaggactcagcatcaggggcctttgcagcctggtgtcctacctgcccagcgctcagctgatggggaggctggtaaggctgcaaatggcgttggagggggcccacctcacccattcctgacggatagtggagatgaaagggttagcccttctcaattaaataaagaacctctttgatcattattttgaaggattcagacactgtttttcaccatgactgcaatggactgaatgtgttctcccaaaattcgtatgctgaaacttcagtcaccaatgtgatggcattaggaggtggggcctttgagaattaggtcatgggggtagagcccttgtgaatgggattagtgcccttacaaggagttacaggagacagccttctccctctacctctttctctctctctttctttcttcccaccctccactacctctctttctctccctctttgccctcccaccatgtagtgccttctaccatgttatgacacagcaagaaggctctcaccagatgctggcaccttgatattggacttcctagcctccagaaccataagacaataaattccccttcattataaatcacccagtctgggccgggcgcagtgactcatgcctgtaatcccagcactttgggaggccgaggcgggtggatcacgaggtcaggagatcgagaccatcctggctaacatggtgaaaccccgtctccactaaaaatacaaaaaattctccgggcctggtggtggacgcctgtagtcctagctactctggaggctgaggcaggagaatggcgtgagcccgggaggcggagcttgcagcgagccgagatcgtgccactgaactctagcctggcgacagagcgagactccgtctcaaaaaataaaataaaatttaaaaaaatcacccagtctgtggtattctatattgcaacacaaaacagacgaagacaggaagacaaaaaattaaatcggaacaaatcattttaatgttcagaatatttgattattaatttcttgggcaaaatcttgccccaaagtgatctcagggaagcttcatcctgtcctgcaagaagctttccctaacacctttgtatcagttttccattgccacaataatgccacgtaatggtcgtaagacctcagttcattgcacacacttatggaatcagtgaggggccagtttagtggcttgactgtctggctgggctcactcatgtgtctgggggccagctgactgttgactgatctaggctgacctcagcaggagtgacaaggactagcctgggcaagttcccatggtgatgacagaggcccacaagagcaacaggaaacctggaaggccccttgaggcctagctgggaactgctacaccaccatatctacctcagttctattggccaaagcaaggcacatgggtgggcccagagtccggataagaaagtgctgcaaggttctaaagcagagatcttgggtctgggacagggacaaagattcagagccattgtcatcacctaacacaactgcctctcctcaaagacccctgagctccagtgtggctcagtgcttcaggacccagtgaattctatattttctgagacaggtcacaacttctggtccacaagctcagacatgccgctctccaaaataaattcatttttctctaactcaatttctgtgcgaagcccccaatccacctcttggcagaacagaacctcagccaatatagggtcattttgttaaaatcagaatgttctgggggcagtttatggtatctccttccattccttagtggggttgggtttgagatctacaaggtctttggggatattgagcagggaagccctccgacatttgctgacatttccaaatttcctgtgtggactgggtcgctggtcccacagtttaaggggcccctttctttcctagtcttcacttcaagtccttgtacctcaggactgccaggcccttctgggggaggggagggcgggtactccccagggaccctcagatactctcacgccaaactctggggccacagggcacccatgggaaagaatacggacctactgccccactcctcagagtgtttctgatcctgtgcaagctggtatgaggaaacttctagaaaacaaggctctggtcttcttggttctcaagtcccgggaccacctcatctcagcatggtgttccgagcctgagatggagtacaggaggtggggagcagcccctctctgatgtcctggctaattgcctctgtgatccccttctctgaggaatttccattctctcttggcaagagtagagagagggctgtattggccctgggaatatccaatctcccatttaggcccaaatcccaacttttgatgctcaagagacaaaaattaatatcttttgttcttctctgtatttctgctggaacaacccttccctgaagttgtactagcagaaaaccagggaaaggagttcatatttcaaactatggccgcatcatatttctatgaatggtagtacgggactgggccttatccatcacccagggaggcatcgtaagtggtgggaaaacctggatctggatgacctcaattccagtcctggctcagccacttgcaagcttaacgtctctgagcttgcatctacccaagcaggcttgcagcagatctgaaaaatgcatgtgttaggcagaataatggccctctccaaaaggcatccccaccttcatcccaggaacttgcaaatatgttgggttacgtggcagaggggaattaaagttgctcatcaatgaccctgagatggagatgttgtcctagattatctgggtgggctcagtgtcatcacaatgtccttaaaagtgagagagagagagaggcagaagtagagagagccaaaggaagatgtggccatggagggcagatctagagagggtagcatgagaaggactcagccgtgagcctggggctggtgggtgggcaccagagctggaaagttaaggagatgattccccccagagcctccagaaggaaccagccctgctgacaccttggtcttagccctgtgagacccgtgtcagagctacagtgctggaagatgacaaatgtgtgtgtttttaaagtcactaagtttgggccgggtgcagtggcttactcttgtaatcccagtactttggaggccgagacgggcgggtcacctgagatcaggagttcgagaccagcctggccaacatggtgaaaccccgtctccactaaaaatacaaaaattaaccaggagcggtattgcacacctgtaatcccagctacttgggaggctgaggcaggagaatcgctggaacccgggaggcagaggttgcagtgagctgggatcatgccattgcactccaacctgcatgacagagcaagcctgtctcaaaaaaataaaatagaataaagtcactaagtttgtgatagtttgtcacagccacaagaggaacccacacagtggctgtgaaagtccttgtgaatggaaagcgctggcagaggggagacatcactcagtccagccacgcaccaccagtgccagaggtggagcccaagctccagcaggagagacacctgggttctaatgtcaccttcgctgctggtgagcacaggaacctcaggcctgtcaccccacctcactcagcctctctcctcctctatagaaatcatccctgccctcgggctgatggcaaggttcaatgagatgatgcgtgtgatgtggttagcgtggaccttgtccagggtgggcctgaaaacatttagtggtaaagacaaagaagaaagggcagccaaagaggagttaccttgttccgagtatgagtgacctccagttatacagagattggcaggtgctagggagggatggatggatggatggatggatgggtggatggatggacaaacagatggatggatagatagatagatgggcggacaaacacatagatagatagatagatagatagatagatagatagatagatagattagatagatacatacatacatacatagatggtagatagatcaagatagatagatcaagacagatgatagatcaagagatgatagatcaagataggcagatgatagatcaagataaatgatagatacatagatagatcaagatacatgatagataaatagctagctagatgggatagatacttcaaggtacttggattagaaatagtttcttagacatgtagaatacaagaatatccgttgcagttttattcataaccccaaactggaaataagccaaatgaccacaagctaaagaatggacaaagcatatgatggtatattcatacaaaagaatatcattcagcaagtaaaagaacaaactaccaacacactcagcaacacgggtggatttcaagagtattatgttggccaaaaaagaagctgggcacaaagagcccacgttgtaaggtgcatctacagttgatccagttattctacatctttgtttaggtgaaaaagatgaagcttagttcgtctttaggcacaaatcatcagtgatgatgaaagtcaacataatggatgctctgggggtcgccacctgggagggggagcgagggagcccttggggcgtgggcggtgtcctgtgcttttacctgggtggtggtcacgtaggggcatatttgtaaaaacgtaccaagctgcaccttcacagtgtgtgccctttacctgtgaaaattgcaccccaataagaatgaagaagataacaagaaatggtagattctacacccggagcccacagagggacttagttaagtgtttgaggaaggaagataaagggggttgccaggtgtgggttctggtgttactgagcctcccagtgtcctttccagatcctgggagctggcgagcatctccaggatcctcaggttcgtcccaggaggataagcagcctgtgagtcggtgctgtccctggctaacggctttcctgggctgcctccacaacccaggacctgccacacacaagcaaggtagggaggacagcctctcctgtacccgagcccagcagggaagccacaccctccccgtcgggcttctcctgctgttggccctggggacttacccagcagggaaagccacctcctgcccaagctgcccctacagtcccgatctccgcccccttcctcctctttctcctccccttctccccttctcccctctctcctcctcctcttcctcctcctcttcttcctccacttttccttccctcatcctcctctccttcctcttcctcctccttctccccctctccttccttctcctcctcctcttcctctttctcctccccctctcccctctctccttttcctcttcctcctcctcctcttcctcctcttcctcctcttttccttccctcttcctcctcttctgcctcctcctctccacccccctcctcctcctcttcttcactggggaggaagagaccatacaagtgtccccgccaacctgcggtcacgtggcctccgtcagcacagggccctggcacatctgtttcctcccaccctccagctaggactgctgagcagggcagttttcagagcacggagctggagggaggggcctgagccaggcaagtgtggcctgtaaggcccttggagaccccggagcagccgtgggccacactgtggcttgcccctagactcagggccccaggggctttgtgcaaacaatgctgagggagagtggccaattaggggtaccctcctggctccccaaactcctgctgagcctctctctcgctggtgctggagctctcggggtccatgctaatatgggtagaaaagaaccttctggaaggcatgttcagcatccccttaccacccaacctggagccaggcatgaagaatgatggtggtcagggaggcagctgctgttgagctgactttgaacttgaactattttgaaatccagctcataaatttccagcccagcccggggcctccccttcgggtctgggtgtggaatctgtcgaggggccctgggtctgcagcacaatgccgcatttacagagctgcgctgccagtgcctgagtgtgtgtgtgagtgtgtgtgtacctggggacagagtgtttgtgcacggtgccaaagggagggccccgcacatctggaaagtgtcaggtttaatgcccaaagccacgggcccaggtcagctaaaagtacatgtttgcttccagccgcagctgtgcaaactcccgctgctcgggctgtgctgggctcagtcaagttccctcaaagacagtggcccctttgtcagactccattccaatcccccgtttcaaagtcactggcctgccacggggccccctgccacaaacagctgcggggcagcatctgtctgaggctgcattcattccaccaggagaaggaaaatacagcaatttagggtctcgaatctacggctcatccaacagactgcacccctcccatccctgtgaaacctctctgtctcagtggtcacacacccgccaccttggtcctcatcagggcacagcacagccgatggcagatgcagcccttgcccgcggggagctggttgtgctccatttgctaaattgtggttgtcgctcggaaaatcgtctccctgcagatgtggtttggtttatgtttggaggctgagaggagcacaaacctgtgtgtgtgtgcatgtgtgtgtgtgtgcatgcgtgtgtgcatgtgtgtgcgcgtgtgcacgcgtgtgtgagcgcgtgtgtaaatgcactcatgtgcattggcgtgcacacacgttcgtgcataagagatgggggtagattaggaacagtgggagaaaaccagtatcagcctgggctcgcccctcaagcagagctgtagctgaaggctggtgagaggccgtgtgtgggaatcgggcccaggagcagggctggggctgggaagtgaaggagggggcgcccatgaacagatccttaggggctggtgcagcatccagcgggagctgcccaggagtctcctgaaagcagccgcagaagtgttcccccgcagatgaaaagggaagcattgtctatcagccgctgccccccattggtcacagggcggggaggggggctctgtatatgtcagccctgccctcacactcctgggtttcccaggcagggggtccaagcaggttcttgcaggtacaacacacaccgcagcatccgcaaaaccctgggggaggaagcaagaggtgcggggtgtgcactaaggtgagagccatcccatggcacctgcggggagctgctctctgcagaaacggggtaaaacatgggttgagaggagcccaacggggcacgggaaggggcccaggcagccagcgtgggtcccgggcagccagcatgagtccagccagcgtgggtcctgggacagccagcgtgggtctcggctgagcacaggaaggggccccgggcagccagtgtgagtcctgtcagcgtggatcccagggcagccagtgtgggtcccgggcagccggcatgagtcctgaggcagccagcgtgggtcccgggcagccggcgtgggtccccagcctgagcctgcctgctctgccttttgctggaatgttgctctccccacagctgccggcctgtgggagccaagagcttctccctcaccagccaaagaagaggccaggagcttctccctcaccagccaatgggttctggggcattccagtcttggaccttctccccaaggaggactgacaagggctggggaagctcaccagggcaccgcccctcagtggtttcccagcagccctggaaggaagcgcgcattgtttgcacagctggttatttttcaggtcgagaaaacgtgatgtgattggcagtcagtgtcctgggggtctgtctgctctgggggctgggtgggtagcaccctaaccagctctggtctccctccactgcccaagttacaatcgccatcgatgcccctctagtggatgcacgtatgatgatgacggcgatgacaatcaccacagctaacactgcgacagcactcactttgtgccaaccactgcttgacatgcttcccacatacgaactcactcagtttttacaacaaccctatttggtagatgctgttatgagccccattttacagacaaggaaactgaggcaagggaggctaagtcacttttccaagtaataaatagtatgttagatggcgatctgtagggagaggccagtggctattttgaacaacaatacaacctaccagctatatgttatgacatacatgaacagtggactccacctcctacctctttagaaaattgggatattttcccaatactacagtgtctggagttatcaaactaacagcagttcaattgtctcatctatcagcattctgacaactctagggtataatctggatatttatggggagaccctgacctaccgggcacttgcaggggtgggtgaccccaaaaatatccaaattatattccagagttgtcagaatgctgatagatgagatgagtgagctgttgctgctttgataactccagacactatagtattgggaaaataccccaattttctaaagaggtaggaggtggattctgctcttcaagtacatagtaatatgtagctggggggttgtattatggttccaaatagccactgcccttccctggggctgcatcccacacttctgtatgtccttgctccgttgatagcaggcttcaccatgtgacttgttttggccaataggtatgaacaaaagaaacatgcttcacttctgggcagaatccccaagagctaccatgaggtcctccgcttctcttttctccctaccacaagactgacatgactccaagagggactgctcctttagcctgggtccctagaatgaagattgatatgcagaaaaacttcagccagcctgcaatggacttgtggggttagcaataagcttttgttgttataagccactgagagccaggggctgtatgttactgtggcagaacttagctgaagctgactaacactgttactaacagaatcattttcaaatgtagaaaataaaagtggtctctgaaagctgctatgagttcacatagaacaagtcacacctgacaaatgccttttatatatttgatagggttacacgagtgatacagagaggaattttgtagtataaggatatctgaagttcagcttgcattatcaaaaactttgcctctgtttcccataaataagatagagaaatgtgagctgggtaagagcatgattaaatggtttcataaccattacagtgaggaaccaagaagggctgatttcatgtggctgatgccaacctgctgaaaggtctctaatggtatgtcacagggctctacccttgtttcactcagttcagtgttttcattaatgatttttcacaaggccttcaaaacctaggctgatcacattaaaaaatgatacaaagctggggagaacagtctggtaaaccatgaaatatttttggcagagcagaacaagatgaattgtaacagagatcaaacaacgtcttaaaaaaccagaaggggccaggtgcagcggcttatctctataattccggcactttgggaggccgaggcgggtggatcacgagattgagaccatcctggtcaacacggtgaaactccatctctactaaaatgcaaaaaattagccgggcatggtggcgtgcacctgtaatcccagctactcaggaagctgaagcaggggaatcgcttgaactcgggaggcagaagttgcagtgagctgagatcgagccaccgcactccagcctggcgacagggcaagactctgtcaaaaacaaacaaacaaacaaataaaaacccacaaggcctggaaatggaagtcatagattcatagcagcatgtatgaaaatgataagctcggtgtgagttattattattaaatgccaatattcattgagcactcccagtgtatcagacagcgtgccaaggactgacttgacacaattccctcattgtattcttccccaggatcctgagtagttcatgctgtgctttaaataagaggtacattcattgaatcacctataggaaaaaaaaaatcaaagcatgtaactttttccataaagaaactcccaggagttagagaccactctttctggaatgcaatggcattttctattatttcttcttaaatgcttttagattaaggattctgtttaactcaacaaatacttactgaactcctactatgtgtccaacattcttccaggtactgggaacgggttggtgaataacacaggtaaaatctcatccaccgtggagttgcctgccaaggtagaagacacaaaaaagaaatgaaccctctaatttttggtggtgattcattctgtgaagaccatcaacagggtgagaaaatacagagtgactggggaagggggaggggtaattatatgggaagatcagggaaggcttccctgaggaggtgactttgggccgagccctaacaggtgacaagaatccagccactggttccaagaaagacattccctcatattctacttcccatttgattagaagcctgcacagggaaagaaacagaaaaaaaacaaacccagcaccctacttcttgagcccaggagagggaaacaatgataagacactcctaggtgtccagaattctctcaagcaggggctcccctggggcccggacatcagcagataccaggaacctcattgtgcactgagtccagcacaagtacagaaaataaatctgaaacgggtattttcctcaacttggattatttttgcagtgatcgcgtttccttgtatgttaagaaaccttgggaaattatttgcttaacgggagcgctcagtatttctcaaagtctttttttttttcaatcttctttccctttgctcttgctttccttctctttgtttgagttttgagcaaaaacttcctgcccgctgtgatattttccccatgaatgtcaccaaactaagtaggctagaaaaacagttgtaggaaatatgaggaatggccaggaatcagggtaaacagcagcctgggaaccttccagaagaaagtgcagtcagcgactctgacctcgactcctgtcagcaaattactccaaaatcaagttggccatttgagttccatggacgggttccccttgcaagacactgcttctttaagtcccttgggcaggaagtggcgattccagaggtcccccttggcatgtccttgagggaacaaagaaagggacacacttcggaccccgtctgtgtgtgaagttggtgatggggcatgaccatgatccaaaattcacccggcaatattaaagctggcctgggtctgaactcatgaaagataatgatttgaatttcaaaggattaaaagaagctcatggaaatgatgattaagcccttgaacatttaaaaaaaaaaaagattaattctgaaccaaagagctgcaaaaaaaagtcaaatgtgaagggaagaatgtcaattgtgcccttagaaagtcttgctgggaaaaaatacggaaagtaaaagaaaaaaaatcattgtcatttttctgctctaagaattacagcagagttcccaagccttgttaaattaagataaaattagcttattgcatttttatcattttagatttatttttcaagatgaagttccaacgaaacctcttttttctctctccttttaacaatatgtgagctatgactccatgtcaagtagcttggcttcaggtgccctttttctggtacctataacccttggaaaaaataaagccctcctgttcttccattaatggatttgtctaccagactgatgtcactgagagaattctttcatgtccctgtcctgttgccagcagttggcatctagactccactgagctgaggtccccttcttctagaatcttctgcatgaagaaagagccccttcttctcaccttctttatctcttctatattggtcaggataagtgacagcagctactgtaacaaacaacccctgcatctcagtggcttaaggctcagctgtcagcccgagggttctgctccacacagtcattcacgcacccaggctccctccatcttgtggctccaccctccttgataccctcggagtcctctttattcagccagtggatgaagaaggaatgcgagggtggtttctatgggtctggtagtagtgcacatccattccactcacattgtagtgttcagaattcaatcacatggccgcacctaaccacacagaagcctggggaatttagtacagtgtggtttcctggaggaagagaagaacttgaaaaccagtgaacattagtgatcttgccacatttgctactttttctttctctctttggtatcacctccctgttctagttcatctctacattgatatacctggctaaggcagttcaggctgctggaacaaatgacaatagactgagtggcttaaacaacaaacatgtatttctcatatttctgggggtggggatgcccaagatcaaggtgctggcagagctagtgcttggtgaggacttgcttcttggcttgtaggcagcctccttctcactgtatccacatatgatgcaaagtagagagtgacaggaagctctcatgtctcataagggcactaatcccattcatgggggctccaccctcatgacctaatcagcttccaaaggccctacctcctaagaccatcatattagtcattgagatttcaacatataaatttggggaagggggacaacacagacatttcataaaaataaaaaaataaaaaacacacaggcactcatgtttttccctacatagcaataatcctttttcttactaaacctcctagattctgttgaccaagttggtcttccttggttcagaacagcctgagtgtcagaaatgtcaagttacatgagcatccatgtccatccatccatccttccatccatccatccatctatccgtccattcatccttcagtccacccattcatccatccatccatccatccatccatccatccatccatccatccatccgtccatccatctacttatccagacaatatagttaatgatcccccatgtgcaaaagcatggtgtgatgtgccgtccagaaagaaaaaaagcataaggcgtgctttctgcctttgaggagttgataatccaattggggacataagaactaagcacacacaaagctagcaaagacaccaggcccaggcatgtggagacgagcaggaaccactgagaagcagaggccttgcgggctgctccccatgcgcctgcacccccctttgtccagacacacaaggatgtgtctgggagttcttccctggtgccctccatgaactctcttcctcagttccctctggttctccacggttggtctcctcgccctcccatacccatttctcttgcctttctgtgcttctttttccccacccatctccccaagcctctcttcaccttcttcctgggacacagatgcctccagagtgtgctagcctcagagcctttgcaggaacagaggaagcctcagggcctttgcacctctgtttctctgccaggacaccctttctcaggctctttgcagagccggccccttttccccaccaggctctcggttcaaaagccacttctgaaggatatttgtggcccggcctctgccgtggaaagccgctccacgggtctttctctgccccatcacccattttatttttatagtatttataactctctgaaattacctcatttaattattttcttcccccaatccccaccccagactggatgtcccccaagaatgaggaccaagtatgactagtccctggctctgtcccccattgaccggcacacagtaggtgcttactcatcactgctgattgaagggatgacagacagcccccttcccctcccctcctttagcatctcaggactgcaccaggagcatcactgagccctggccactccaggaccctgccctccggctgggcctggtccccagactctgccctttctggagctccgggcagcgtgccaggagcctggagccttgcattaattcctgctcaatgccctttgtcttcactttcagctgaaaaaccacacaaccagaatatttgcctggacttgcgtcttccttgaggaatgaatggaaatggtgtgcgtttgccacgctctctggcgtactcaccctgtggcatttcgggggccagtgggcccctggaaactgtgcttcctccttgccatctctgcattttcatcagctgggaaggactcactctctctcctgaatgcctttcagccacttggctcttacctggctgaacttcatgctatatatacttttttaaatttttaaacatttttttgcatgactcaagtgagcatcagaacatcctatattacttttaatgtgcacagatgtccttctggtaatttactcagctgtagttcaaaacgactgttccattaatgagttttgttttgtttttgccatgatggctcttgaaaaaccacagcactttttggagccctcctttttttttttttttttttttttttttcaatataacaacttgtttatccccaaacctgctaaatcaacaaatgatgttttggcattatggattcaggcagacacagtcaccaatttatgtgacatcacagtttctagtcagacaaaataactggaaagcaatctggatggtgtgccacatttagaagatctcaaaacatttgctttgcacagattcgccgagtgagaggcatgcagagggggcagtgctcacacttttcatctgctgtgcacgggcgccatttccacgagtgtcacgcactattgtgttatccagaaaggtatatgtgtttcactttaagcattctacaacttgggagcaagagaattgtgaacccctaaaaagctgaaaaacgataaagaaagtggtgtagaaaggtgggtgtattgaaggggatttcttgaaggtaactctagactcaccctataccacccgctactcaccctataccacccgctacccactattgcaggggtcggccaactttttctatacaaggcaagattgcaaatagtttagtctctgcagactatgcgttctctgttgcaaaaggaaaacataatagtcatagtatctggggctatcgtctagcacaaagctctttaccaatgcatcagctggggtttgtggagtttaagccttgtcagggagcaggatatccccaagatgtcaaaatatctccccagagcttcctgataaatcacaaagggaaagctaccttgagcacgaagaaatgaggtggataccacctccacccagtgatcatccctagcatgaccaacagtgggacaagctgacgggatgtgcctcctgaagttgatggcgcaacatggaccctgaaaaattcctgcaaaattgtttatcctacatcgaatcctgagacagcaatcagacaaatccagatcatgggatgctctacaactggcccaaactcgttaaaactagccatgtcaggaaaggcaaaataggcttggggtctgttagggtcgaagaattaaagagatgttactacacagaactgggatttcaccctgctggccagggaagacatggctgtgccacagtctcacagactcaagcagaagacacaagactcctgggtcagagacaaaggatgttattactcacaataatcacagaagccagggggtcagcatgttcttgagccagttccccagctctggtttccacagggccactagaaggggcccaggtgacccttgcacatgcagctgtttgcacgacaggggagaaatccagagtgtagggaacccgaatctttcacagtgggtaataagcctgcctgaacttttctccagagggaaccattatttttattacagtggacaggaagcatgcctatcctttgatttgaagagagacgctatctctacctttcaaaactgttctccctacaaacgttattgaaatgatagcccagaatgaagggcggccaaggcctctgtttgcaagatgggaataaacacgggagactcatgaagaattgtctcctaatagtgacaacgaaatgcaatgtgtgtgatcgcttctctgccttttggctaagatcaagtgaaatgcaacgtgtgtttgagccctgggttgagaaagaaaacagctttaaaggacattgttgggaaaattggggacattttgatatggaatataggttatataattgtatcaacgttaaattccctcagtatgatcgcggtattgtggttccatatcatctttcttcttaggaggtgccgttgaagagttttggggcaaaggggcatgatgtttaccaccaatttttacatagtttagcaaaacacaaaacaaaataaacagtacacacacacatacgagagagagagagagagagagagagagagagagagagagatccgatatgtcaacacccaacaaacccaaatggtacttgggttttcattacattattcttgcaaaaattcagggggacccagcttcccccaagaacacacagctggctcttggccaagcctggccgggagcgaccttcttctgactttacggagtgtgttttcactacactcagtctctgattttatccctgccctggcttaattaagtgctctgaagacataaataggttttttgtttactcaagcttgggagaagctggcagaaaaggccttttcagctaaaagctccttacagccggaaggtgtgaagcggcaagtttccagccgggaagaagcctctcagccgtaggcgtctttgcccggagctgtgaggtgagtccagcagccccactgtggagtgggaacgggaggggctgcgggaaagccaagccaggacgctgggtggcagaccgttagaacagctttcattactcactgaaagcactgggaatctggaggctgtcctggacacgcacatacaaatggcagcagaacgtatgcccaggtcaaaggcactttgaattcattttgtccccgcttccctgtcttagtagggcaggtggtcaagagctggttttatgagtggacacccagggcatgggccctgacccccagacagctgcccagcaaaggcgggctgcaggctccgagaggacacgggctaaaaatgaagaggtgagtcactgctggagctctgtccaggcgtggacatctgtggtacagctggggactgagcaagggcactgcggaaaagtccctcgggtgagacaggccaccggggaacatgcgactccccggggcagggaggcatccctgggccaggcactaggacctggcctgctgaggatgcagagtcccaggtctcacggttgtacagtcaccgggaccttcactctgaaacatttgaccacatgcccggctggacagctcagacagggcctgtaaggagcgtgtgatcaagaagccactcttcttgcctctgttctcgccgcccctttgaactcctccacttcaacttcttctgtggctactttcaaaccctcagggatgttcagtgttacttctgcattccctaaaaataggcaagagcccggggctctccctaggaaagacaaagatttcgctgacaccgcagttctctcgtcttttcttcttctcaaaagtgtatatgcatatgtgtgtgtgtatgtgtgtagatgtgtagacatgcgtgtatacgtgtgtgggtacatgtgtgtatatgtatgtatgtgcatgtgttagtgtgtatatttgtgtgtccatgtatgtgcatttgcatatgtgtgtgcatatgtgtatgtgtgtatttgtgtgtttgtgtatatgtgtgcatatgtgtttacctgtgtatatgtaggtacatgtgtgtatgtgcatacatgtgtatgtgtatatatgtatttgtgttatgtgtgtgcttgtgtgtacacatgtgtattgtgtatgcatctgtgtgtatgtgtgtatatttgtgtttatgtgtatatacatgtttatgtgtgtacatgtatatgtgtgtgcatatgtgtgcttgtgtgtatgtgcatatgtgtttatgtgcatgcataagtgtgtgtgtgtctaaatgtattgattatcttggtgatttcacacagagaggcatgaggtgtggtgatgagagcagggcccagctgagcctgcgaaaatttccctggcaccatgctgaggcttgtgcctggcgtgcctggaagcatacccctaatatgcttatatttaatcttcattcactacctttattatcatccctgctttatggatggggacactgaggcacagaaagggcaggccaattgcccagatcacacagccgggacatggtagggccagggttcaaacccaggcagccgagcgtgcacatggcaaggagaccccttccttgtctgtaagcctccttggaaggcgagcggcctccaatgcgctcagatggccttgtttcagggctctctctgcaggtcacagaaaagccttgcagttgtcaggcatgacgacctcagtcctcctgcctccatgtcacggtccactgggacccactgacagccttcccccacatccaccctagcagcctccagtttggctttctacttaggataggctgtgtgacctcaggcagtcacttaacctctctgagtctccatggctccatctgctttatttatttatgatttatcttttattttattaatttatttttttgagttggagtctcactctattgcccaggctggagtgcagtggcatgatcttggctcactgcagcctctgcctcccaggttcaagggattctcctgcctcagcctcctgtgtagctgggattacaggtgtgcaccaccacacctggctaatttttaagtatttttagtagagacggggtttcaccatgttggtcaggctggtctcaaactcctgacctcagttgatccacgcaccttggcctcccaaagtgctgggattacaggcatgagccaccgttcctggcctgctttatttcaaaatggaaataatatgcagccagggttcaagtgcacgatggtgcgtgtgcagagctctgtaagctgcccaggaatgcgcagccctacttctaggagccttccttcaatgctgcttggaacaagtggcaaatggctctccgtgaaaaagcctttttttttttcctcaacacccttccctctggccttcctcgcagagttgagcttcccccacacaaagcattctgggaaaatccccctgatatggggagtgcttggggagccctgggctggggcttggggttaccccaggtcacttttctttcttccccaacatgtgctctgaaaagccagtgacttcagaagcttgtggaggaaggtcttccttcccaggggtgtatggtgcatacatatgcatacacccttctccccttctctccaacacgggacccgctctttacgaccccttgtcagggataccccaatacctcttttctattaaatatctactttctctgcccaatttttctctgcctccaaactctcctttctttcatccaactttgtttatgtgcatatgtgtgtatatgtgaggaactttggaagcgatttggatcagatcattctttacctgcttcaaaacctctgcagattctcccatccctggcagataaagccccaatcccttagcacagcataagggcctccgtagacctagtaccttcttccctctgcccttcctacagcgctgggcctggagcagacaccccgatcttgaaagacccccttttctgctcctcaggcctcacatttcaagtcccttttccttctgagactggccacaagagcctcctgccctgcccactggctagcccctggctcagatgaatttatggaaatttcgtcttttcctcccctctttgacatttgcagaccatctggtgctgtgagaaatagaagcttccacagtaccggctttcaattgaggggcggtccccagcccacagcagcggatctgaataggtcagaggtcatggtcactggggccatcagtgtgggctgctctctggggctttgacctttgtagtgcactcatgttctgcctgctgtctggtgtgcacatatctctgacggttatccacacagggcagcctgtttcaggggaaacttccagaacccaggtgggcatagtcatgaaggcactcttgataagcgggcttctagatcaagatgaatggcacaagggggccaggattagtagagtggggcaagggactttcaggacatcgcccaaacacagaaatcaccacaaatggtatttcgctgcaatgttttaaaagtcaaaatggatgcaaacagttcaagatgaacaaaacatcaacattttatcttattttgagacagagtcttgctctgttgcccaggctggagtgcagtggcatgacctcagctcactgcaacctccacctcctgagttcaagcaattctcctgcctcagcctcctgagtagttgggattacaggcgcccgccaccacgcccggctaatttttttgttatttttagtagagacagaatttcaccatgttggccaggctggtcttaaactcctgacctcaggggatccacccgcctcagcttcccaaagtgctgggattacaggcgtgagccaccgcaccaggcctcaaaatatcaacatttcaaataaagacagaggaaccctgcaattctgagactccaccttgcccgcatcctgccctgccctgggtagctattgtggccaaggggtcattagtccctgagataagaagaaattagttcttgccgaagactttctccagggaagcagaagactactgggtctgggtgggtgagcatttgggaaatgtgaatttccatgtgtctgtgttccagaaagaatgccccctccccccaccgctttcgtcctagtcagtgacagtagttcagccagtcattctggtcaagtggcccaagggctgaagagggcctggcttgcctaagaattgaagcaaatggaatccgtagtcccattgtttttttcccagaatgttccaaatattcaaacctctggttagttgggtctgtttgggcagcagacttccagcgttctttcctgggcgacatggaaatgggctgtaaattcacctggtgacaggtgcatgcctgtcaccctgtgggctctcaggaagcggccccaccctctgtcagtgtccggcatgcaccttactcctgctgctgcagggcctgcgccctgctgttccctccacatggtgcgctaattctcactgcttggctattcagatcttatctttgaaaatcgcctcctccaagaagccttccctgaacactccaaagccttaagttgtccctttgactattcttggttgcagcacctcattaagttccttcccttagactcacagccttagcttcctggtgcattgacaggctccctcatcagactgggccctccacagggcaggggcctgctgtcttacgcctgcccgttctgaggtccggccaaggctgggtgcggaatgggagcctgagaacatcttcaaagtgctgccctcagtttgggggtgtccaaagagcggattctgacacccggcttcccgcccctgatcttgggctttctgctgtaagctgaatggaagtgagtgtgtctgggcacactttcacccctcctggagtctacctctgttctcttcgccctattagcctctcccacattcctgcttttcaaagcagtccgtggacacccccagctgccccgcttgcagaatggaaggatggatcctcaggagtggggtggggggcgtctgtgtggctgggcgctggaaatgcagacatcctttgccaggcatctgataagaaaacagtaaggaagggaaacacgtgttcttctctcttgggaggaaggaaaagaagggaaagaccggcaggacccttgttcatgagcgaggacctgcctggaaaaaatgcaggaacagccagatgccgggggattcccggaagtgctgctcatcgcccccgccgcccccacccacaggttccacccaatgctttccacccttaaggcccaaagagctggccctgggtgtgcgggtaaccgagacgccagtactagggctgtggtggccctcctccccatcgattgtaagttacagagaaaaagaaaactctaaaataaagtttctcaagctgcttttattgggacttcaaatgagatggagaaaacctccaagagcaccacgaaataggatgatgatgattactcgtatgtcttgggatgacttggggaccccacaaggcaccctcggtgcgccagtgtggtgcttgttccgggagtgggggacacacgcgcctcgtgggactccagctgctggctgggcgcgcagtgcccaggagcgggagggcctcggcggaggcgccgggccggggctgttgcccaccgcgcaggccggggcggggagaggaagggggaggaggaggcgcctagaaaaggaggcgcgggccggggaggtgcggagagggccgggcggcaacgtgcgcctcggggctgggccggcctgcgggatcgcagcgcagcgcagaggcgaggctgggcccggcgggcgggagccgcggagggcggagggcggagggcggcggcgctggcaggagcgcggcccacggcggcgagcaggctgcaggcccgcggggatccggggcgcggggggcgccgggcctgatcgccgcctctcgcggtgcccgcaggtccccgggcgcgcagctctcgccccgccgccgcctgccccgggccccggagcgcggtggagaagcccccggaggagcggggggcccgcgccccgcgccccccagacatggtgggccacctgcatctgcagggcatggaggacagcctgaaggagcagggccgggagggcttgctggacagccccgactccgggctgccccccagccccagccccagcccgcccttctactccctggcgcccggcatcctcgacgcgcgcgcggggggcgccggcgcctcctcggagcccccgggacccagcgaggccagagcggtaaggaggcgctctctctcccaaacgggggaccgcgtgggcgggtgggtgagggctgcccccagagacgcgcgccactgcagcagcaggacgtgcctcctcctctacctgccccgcaaccacgaaggtggccagtgacagccacgcttctcaggtggggaccagggtgtgtagggggaggtgatccaggctgaccccggacctggagacggctccctggcggtgggcctccctccagagtgattcttcctattgtcagtaataatggggggctcatggggcggggtaaaggacggtccgaaattcccaaagaagttggctgttggctaggtgggcttgcgcccagaggcccagcatgttgcagacatctggacccggcccctctgctgctccgggtgccctgtttactgtccgggcgctgccaatgtgaaagccttttctttctttctttctttctttctttctttctttctttctttctttctttctctctctctctctcttcttctcttctcttctcttctcttctcttctcttctcttctcttcttttcttttcttttcttttttttaaataaccaaacccagacaggattccttccttcccgggatgttaaggcatgttgacgtggagcttaggcgggagggggaggctggaacctcgggtcaggaaactcaggagtttgtctcctgccagactaagtccagcctgggggtggactccggtggggacccagcttggcgccttgcctgagactgggcaccccccggcaggcggggaagcatatgggccgagcgggcgcctttgcagcctgaggaaatgacaagttgaaatgagtgattgcccatccctgcccgctctctggctgcgccctgcccaccttaacagctttactgctggggcgtgtgtgctggctccactcccctttcctggggccccggggattcttgcctggcactcacagggcaaaaaaggcctccccgccgctgaaaatcctcctccccacagcggaaaggagcggctccccggcctcaagcctcaggatatgaccttcattcgtgccttgcttgtttcttagcctggtgggtcccaaacttggtcgcccattggaatcacttggagaatctttaaaacccacccacactcaccgcccagatagtctcactgaattgatagggggtgcagctcggcatcaggagggtttcagtctccctgggtgattgtactgttcagcaaagtctgggagtcactatcttagaccaaatcatgcagcaaatttgaactttggtctctttatgggagcctggcgggtggaaggggcagtgaggacttccaggagttgatagaggtgaccagggctgtttgaagtgaacctgatcttgctgtctaaagggggccagctttcctgccagagcctctgggacttggcactgtcgcccatttgagctgcacactttgggactgaatccccgtggtgccttgcacagtggggcttggagaaaaacgacctggaatccgccttctccttggttccttccatgacccagaagcctccttacagagggttttctggaagcgttctctgccatccgggccagcccgtggctgccgcaagaatagcatggctggcttacttgtcttggctcttctacttgactttattttttccccttcctgctcactagatgccaggtatgaaactgtgttgccctgatcttctaatttggcttaaaagcaaagcccggggctgtttcctcatgggttatgatacttggcatttagatagctcataccgtgtgccaggataactgtcctaagctctttatttacaccaattcatttaattttcactatattcccatgaagcctacactccaattagccccattttccagaggcggaagccaaggcacagaggaggttagcaacctgcccaaagttgcccagccaggaagcggctgtgctgggctagacccagagagtctgactgcagagtctgcccttcaacctcatattatcccccttttcactgtgcagctaattaactacctgtgattttttttttattggaaaacaaaatgcctgtgtacctaccaggtttgaagggctgctttcaataaaagggagaaaggattgcctggcgcccactcttctcagctttggggcttgccgctgtggccatgcccacccacccatcgcccaccccacagggcgccccacctccccgttaactcccgctaaactttgctgagcggtgtttaaccgcaccctgctcactgacgactcagggagagtgctttttaggtgcaaatatcggcaccccatactgtctcaggacaaagaggcggaaacctgtgctgcgcctcgcggctgagggtttccaacacccgaggaagaggatggggtgagcggtgccgggtttccatgtgggcctcaggttcagaccgcgtttggcagggtgggtgtctttgttccactatccagtgaacgacaccacctttctgataaaagttggtggcatatgcctcagctgctgggatggactgcagtcccgccctcaaatctaagccactgaggtcctcaccaccttgtcacctactttaggaggctggacggacgtgcatgttaaacctgcctacgcttcacttcattaaagaggcccccccactttgtttgaataagctggacttgcctcctggacgccccccacccactaaggcagggtatctgggaagcggctggctgtaagatcactccccaagacatcaaaggccctgggggccaggctggatatgaatgaaccccctccccactcaccatgggctttttgtgctcactcttggagcaaaggtgggaacattcccgatcactcccaggccagacgaagagctgggaatcaggcattggtccccccagtacttactgagcacctactgtgtgtcacgctctgtttggggccatggaggacacagcagtgaacaagatgctgacggtccctgccctcatgaactggcatcctagcggaagagacacagccaccagctgaactatgtgtggcagcagcaggtggatggagaagtgtccttaaggccagaagctgggtgagaggtgagctttaggcaggtagacagggaggtggtggttaatagaaacccacacacactcagggtacgaactttacagttctagggctgagatgtgctcagtccgagacaatggcatgtgcaaaggtcctgaggcacaagcaagctaggcatggcctgttcgggtgatgggtgcacaaaaatctcagaaatcaccactaaagaacttatgcatgtaaccaaatgccttgaggagccacaaagaggcagggaccaccggagggccgggagaggccaggtcagtgacttctaggtgaagctgaggccaaaagttaaaattccatttggtcttttaaaaactacttgtgactgttctatttttatttttaaaaagccatcatgagcttccattccacactccccaaattagaaactcaaatgagagacttgagtgaggagggtgcccgtgcgggacgcagaatgtggccattttgcatcagtgtagggcgtgtctccatgcgggcagggacctgtctcctgcatggcccaggacagcagagcctgcccactgggcctggtggcagaggagattgtctgtcagctgcattcagcccacagtttttttaaatttattttttaatgttttctttccataggttttgggggaacaggtggtatttggtgacatgagtcaattctttagtggcgatttgtgggattttggtgcacccaccacccaagcagtacacactgaacccaatttgtcatctcttatccctcaccctcttcccaccctttcccctgagtccccaaagtccattgtgtcattcttatgcctttgcatcctcatagctgagctcccacttataaatgagaaatacagtgtttggttttccattcctgagttacttcacttagaataatggtctccaattccatccaggttgcttcaaatgccatgatttcattcctttttatggctgagtagcattccatggcgtatatatataccacagtttctttatccactctgattgatgggcatttgtcagctcacagatatttaaagcggggtgggtgagtaacacagctgctgcctctgctgcctttgagctcccagggcctggactgtcactgcagattgagcaaacacccattgctcttctcctcctccccgccctgcccggcagagctgtgggcatttaggggttggcatcgtggaggaatgaggatggctttgaggcagatctatctccctaagtgaatatgggcagttcggagaagtagccctgtgccatcttactgcactcagggaggctgaaagtggcatttgggatcttacattgtgttctctggggttcatgttcaaatgaacagcccccctgtggcaagcaaaggactcagcctgttatggggcaatggcaggtggtgacagatctgagctgttgctgcctcccagatgcagagacggggcctctggccctggactgcacccacagctggtggcctgggctctgtcaccttcagggctccttccctccatccagcctccctcagtcttgtttatgcagtgggtggatttctgaagagtgtacgtgagagcttccctaaggaagacgtgctggatccctggacccacattgcaagagaagccatccctaagaactcccctgggggcccagctcttggaggccgcctgaggtctcagccatccctttggaccttggctgggacccttgggactcttggattttctcatttctgcttcttgtctgtgatggtgaaactgagtatgagagaggagagggaagggagctagggaggtagtgctggggttgggaaggatggatggatggatggatggatagatagatggatggatggatggatggacagaagaatgggtggatggatggatggatggatggatcgatgggcaaatagatagaaggatggatcgatgggcaaatagatagaaggatggatggatgggcagaagggtggatggatgcatggatggatggatggatggatggatggatggatggatggattgacggatggatggatggatggatggatggatggatggatggacagaagaatgggtggatggatggatggacagaagaatgggtggatggatggatggatgaatagatgggcaaatagaaggatggatggatgggcagaagggtggatggatggatggatggatggatggaaggatggatggattgatggatggatagatggatggatggaggatgaatggatgaacagatggctgaacagatggactcaggaaaacagggatcggtccccatggccccctggcaggcttacaggtgtgttcctgtgaaggtgtctgagcaagctaaggtggaagacagccaggtatgtcaggacaaggtgggagggagaagcctgtttgcagaaagggaggctgtgaggagggagaggagggaaagccagaagccctgcgcctccttccagccgcgtctgctcgatcccgggtgaactggcctccagtggaaattcagcaaagtgtctgacagccccggtctccggggcaggcttacccagctgagaaactcagctatatctgcagctttagtgtgaaaagaagacaaataggctcacggccttccaggtgctctggaaacaagggagccacctgcatggggaaaatgctgccagacagactgggggcagctttcccggagacagctttcctgggggcaggtgtggtctgtcctgtctgccctccagtgctcggcctccctgcggggcacggtacatggactgtggacactcctggtgtgccatctgtatcttaggatgcacaggaatccagaggggatatttgtccaccttgcagcaaatccggcctttataagggcagggtctgggttcgccatttttttgtgtacagagatgggtgtcccctatctgggaggccgcctggcagttgtgagtggttgagaaaggacagtgttctgagtgtctggggggaagtgggagaccctgccccaagccccgcagcctgtgcaaagtgattcttgtgccctaggttgacggcccccactctgttattggctggcagagctgtgggtccctgcactcacttcccagagctgccgtgacaaagtgccacagactgggtggcttaacacagaagaaattcatcctctcagagttccggaggccaagaagtctgaaatcgagctgacggcgggggcacgctcctctggaggctgtaagggggtccgtcccacctgcctctcctagctgctggccgcatcacgccagtctctgcctctgtctttatgtggccttgtctctgtgtgtgtccccatgtccagatttccctcttcttagaaagacaccagtccttggatcagggtccaccctaatctaatctgacctcatcttaacttgatcacatgtgcaaagaccctctttccaaataaggtgacagttgcaggtaccagggtttaggacttgaacttatctttgtgggggacacaaggcaggccacacccatcttgctgacttgggtgcaccaggcctgcccatctcaggagggagcccagctggagcactgcctccgagctgcgacgttcgagtttgttcaccgtttctctgccttgggtgtcagatcctgggctcgtgggttccttgctgggcccttgatagttcatggctctccatatggcctgacccactcggggtctcctgggatcccccccaagcagactgtgtcctttcgataatcacattcaggtgccccatagtgccacgttgggggagatcgagaaagacccacccctgccccggccccctgccccaggattcgccaatagccaaggctgtcatcagaagggtgggaattcttggtgcttaaatgcccctccttggttcatcttccccatgggtgatggtcaagattaaccttagcccagcccgtgcgctttggtctcagattcccagtgtatatcccagacgatcaagttctgacagcagcaggggttctcaccgccagggaggtcaggggccgaggtcagggggccgaggtcaggggctgaggtcaggggccgaggtcaggggccgaggtcagagggccgaggtcaggggccgaggtcaggggccgaggtcaggggtagctgttgcaaggctccatgtggctttcataaggacgcctctcccgcggcccgtgtggggctccctggctatcctgctgtctccaggagcagcaacgggggagggggggctctgggtacctcctcctgcctcccactcctgcactgatgggccgctagttggctcctgggtgaaagctcatggttcagcgaactgcgccatagtatctgtggatggcgctgtgtcgcccaggctgtgcctccctgtgagtccctgcccagccgggcccagactccaggtctggcaggctgtcactgtgaggcactgagctctcgacaacagagcggctatctttcctcgccggcctgtgggctatggcctgtgcagcagccaggaaggtggggagctccgaggagcccctgtgtactttgacttccagccagcgagtgttcatccccaccccagcggctcccggggaaggctcctgggtgaagcgggtggggcctggtgggcccttggcgagtgtccacaggacccaacaccctccagggcccgtcctgccccccacactgtcctgctgcccagaagcctgggagtaagcccagcctccccaggccacagcaggcttgccccagaccctggaaggagctgggaacctgggcctgggccatccctgttttcctaagctgggagggaagcatggcatctgggtgaccctcctgtgtgcccgagaagcacttgttctcccctgtcccaacatcccagagcttccaggcggatgctgagccccccaggaaaccaccagcctgtgtcttgggcatccctgatggtcccccagccccaggatgtgggccttgccgatggcacagcctcgtttcacagatgagcaaaccgagggcagacgagggcatctcaccggattctgtctagaccagaacaggagcccgggcctgtgggagggcgctgcagcctcacagaccggctgggggtgggggtggggagcgggcctgtctgggggcttcccgtgcccaaggtggccgcatggccagggcaggtgagcaatgacaggtccccgtgtgcatgtgcctgaccccttccctggccctcccctgccttgccagcccccgtgggactgtgtgtgacccagtcttcggcagtatctcgctcccgcgtggctggaaagtcggacttcagggccgcagtctgccttcttggccgcgagaggcacttcccttgcccactccccaggctggctggagtccacagggcgccacgaccgtttcgatgttcgaatagccctgcagccagaaagacgaagctgcgagcctcaggatgaactggtggctgccaccatcttcccttggtgtccagccctgcagctccgcgggagtgtcctgggccttggcggggacttcccgagccgtctcaccgcccaggcccacgggacgccagcctatatcggtctgggctttcacggcttctggtgtctcctgcccagcgcttccagcttgggtggactttaggtgttttttcagcgggaccctttggcaaatggtgcccggagctctggcttcccgggccagcctgtgaattaggccttgtctgctgctggcagccaggtggggagcgggaccgggcggaaaggggctgcctttgtcggcgcccacgttccaggtgtggtggtatccggagggtttggcagtgtcttcattccgggttgacccaagagagatgccggggcgggggctctgccacagcacaaaggctttgcctctgaaataagccctccctgctcgatgggtgaggagttagcctttcctggcagcgcgtgggtgggtaacggcagcagcaggctgcctctctctccctccagcccttccacttgtctggacagaagaaacacctccccaaaccttagtgctcatgtttatgtccccttccacactggtgtcgtcctctctcctcccctgtggctacatgtcaccccctcttgcgggagaagggccctgggggttcctgtgcctcatctcactcccacagggcccagcacacagtaggtgctcagcaaacaaacacctgcacgcacttgggaaaatgccgagcttcagataacatcttttggggagtgtgtattatttctaaaaacatggaatcatatagagtcttgcagctggggtcagtgttgactgaacggtgagccatagaagatgaggatgggcctgtcttgtcactgccttgtttttgtgaagtgattgttctgaaatgatgcttgcttgcttctgaaagtaagaagtgttgttttaggttagaagggtgtgagctatacctctgtccagggaggtacctccaccccagaccttcatgggaaaggaggatcccccttgcgggcccactggcacccagtgccacccctgggttgggcgctgttccatgtggctgctggctctgactcagctgtgccgaagcctgggaggcgggtcctcctaacggcccacttcagagacgtggaggctgtggtggcccagagacgggaagtcattggcccaagtcacacagcttagcagtctccttggctgctgcagccaattaccaaacacagagtggcttcaaacggcacgaatttgttatcatcttccagctctggaggtcaggagtcccagaatgataagcgtcagcaggactggttccttctggaggctcagaaagagtccattcctgtgcctgttctggctcctagaggggcccgtgctccttggcttgtggccccttcctcctcatcaaagccggcagtgcagcatcttctggccgttctctgactctgaccccctggaaagctgtgatgacatcaggcccacctggatgacccaggaccatatcccatctcagaattcttaatcacatctgcaaagtcccttttgcagatattcccaggtcctgggggttagggtgtggacagctttgggggctgttgttcagcatgccacacccaggaagggagcagctgcctctcttttgggccactcactccgtgtcaatgccagggagagatggggccacctcgaggccagctgctgggggctttgaagaatctcctgcttcttcagtcctcgatcctctccctgtggtcctcagcccttgttctggggtgaccgtgactagcagggatggggctcctggtgatgtttgtccacagactgctgccaaacttgaggacaggtatgggcccatactcggggctctctgggttggggcaggggctgctttgcaggtgtggggtctcccctccccatagtgcaggggcggagaggtgccaggtcctgggcttagaggtgataaggactccagccttagggagctgcttctctgggggtgacagacacgcaaaggggttatcgcgatgaaggccagtagatgggtgctcccgtgtccccacagaggatgcccctaagacttggagaggacactgagttggctctcaccagcccaagcgagaagcagccagtgcagcagggaacagcgggaacaccgaggcagcctcgggtcacagacaaggggccgagacaggaacaggcagaggcccgagtgggaatccttgagcctgtgtcgggggagcctggagctgagggggcagcgatgagacaggcccctgggcatgaaaggcagtggaggagcgagggtgagggcccgggacctggagccgcaccagcagcgttccagccctgacctgcctcttccagctgtgtggccttgggcaaatgacttagccactctgggcctcggtttccacatgtggaaaatgggggtgctgccagcagctgcgtgctggggttttttataaggatcagatgagtaggatatgtggcgagtgcccagaatggtgcccggcacagtgagagtgcaaaaagctctgcatcctcattgtccaggcaggtatgggggcggcggggaggggacagatgtaggagatatcaagctaggtccctgcaggacttggctctgagttcacagttcccgcccagcccgatgtccaccctccactccctctgcccgaggccggtgtgcatgtggtcaccatggttataggcttggccctctgcggcccaggcacgagcaccagtctggaggaatagggtccccaccacctgctgtcccccgtgggagccagctatcccctcttcagccaagaacaaagcactgagcatcaccacgcactagacgctggggtgtaagggatgcagaccgtgcctccccatccgcgggggcatcgtgatctgggtagggccagagagcagggagagggccgcaaacctagaaataaatgcgtaagcaaaacctgctaagtgccgtgtcccagtgacggggtcagggaggtgtcatggccgctgcgcacggtgccccactgcctcagtctccagtggccgtgaaccctggctgcccactgctggcagctgtcccctttcctagagagctgtcctttgggggaaagggagcttcttcccccaggaggtgactcccacccccaggagtggggcagccagtgaccagcagcctgctctcccagctgggaccagtgctgaggcagtcacactcctgcgcccctggtgtgatggggccaggctggtcacagctgtgccgtcgccttgcctggctgacacctgcttagcccctctctcccattcccctggaaggactcccctcataaactggtttcacaagatttcccatcccgagtccctgatcaagatgggaggaggccaggctggggacccacgggtggtctcagccagccccggtgccttcacggagggctgggcggcgcaggccccagggttcgggcttgtcgacttttagcatgtggttctcttgtgtgatcttcctagagccactgtaaaaaaaactgccacaaactgggtggcctgaggaaacagaactctattctcgcacagttccggaggccagagttccaatcgaggtgtgagcagggccacactgcctcagagggctccaggggaggctccttcctgcctctctggcttctggtggctccaggtgctccttggcttgtggttgtgcccctgccatccctgcctccacatcgtccctgtgcgtctgtgtccgctcttttttttttttttttgagacagagtcccgctctgttgcccaggctggagtacagtggcgcgatctcggctcactgcaacctctgcctcctgggtttgagcgatcctcctgcctcagcgtccctagtagctgggactacaggcgtgcaccaccatacctggctaatttttgtatttttagtagagacagggtttcaccaggttgtccaggctagtcttaaactcctgacctcaggtgatccacccacctcggcctcccaaagtgctaggattacaggcgtcagccactgcctccggcctgtgtccacgcttcttgtagggacaccagtcattggctttagggcccaccctcctctgagatggcctcatctcaggagcctcaattccatctgcaaaggctctattccaaataagatcctgtccacagggtctgcgtggacatgggctttggggggggaccctgttctacccacactgcccttgtccttggaaagccacctctggccgtgtttttggtgtccatgcgttgaccctcgctgcttctctccaggacttctgggtccatctcatcttggccacactgggccatgccccacctcccagggagagggtctgcaggtttcagaccagactgtgacctcccttgggttcctgcctccaccccaggtacctccatctctccccattttcacacaggcagacagagccaggggcaaacccgggacctgcccagccagcagcctgagtggctctgggaggagcagagccattgatggggacgtcttgaggcctcttctctgagggcctctgcacacagcaggcagtggtcatttggggctggggccggcccgccggctggaacctcacccacagcctgcgtccccctagggtggcctgtgcagggtgcttgctgtgacagtgagcgtgttctggatctaccccggccagtgcgacagctgccagcgcgtggcgggtgcgactgaggaatggcgtttttcaacctactgaatcgtaatgaatttaagttgaatagccccgtgcggctagtggcccctgtattagaagccctagaacagggtcccagggcatggcctgcatgccagggggaggcagggctgagggcgtgcgggtgtcctgggtgctgtttgtggctgtgtggccctggggcccagtgggggcactccaggacctgtgggccctggggccacagtggactctgcttcccccccaccgatcacatcccgagtggcactgcacagggaagcactccctgattacctggtggtcaaacccttctcgtgccctcattgccctgtcgaccacagccctcctgacagttggaatcttagtccactggtgggacactggtgggagcagtgggggattcaggcagcaagctgcgacgaggccaggagagcctctgtttgccaccatggcagcagtacagagcgcagtgccggcacacagtggcgcgcagtgggtgagctgaacgaaaggcgttctgctgtggccgcgagcatctcttcgcatctgcactcatgctttctccaaagctgtgctattcatacgctctgggtctattattcataacctcagtgatgaacaagctatctgaaaaataggcgggttatttaaagccccgcccttcacctccctgagcccttggagcgggcacgtgtagttccagcagaggccctagggagtggccttgccaggccccctgctatcccagcacaggctagtcaggcaggaggatgcctcataacatccccaatctcaatggcatcaaagagcaagggcttctttctggctctcaccatgtgttcccaacgggttggcggtgacttgagtgttgcagccacacctcaaggagaacatctagggctgccttaaaaggctttaggggccaggcgtggtggctcacgcctgcagttccagctctttgagaggccagggtaggaggatcacttgagcccaggaatttgcgatcagcctgggcaacatagtgagatcctgtctctgcaaaaattgttttttaaattggctggggcatggtggcatgcacctgtagtgccagctatgtgggaggctggggtggaaggattgcttgaacccagaagttcgaggctgcagtgagccatgattgcactaccgtactctagcctgggtgacagagagagactctgtctcaaaaaaaaaaaaaaaaaaaaaaaagcctttagaaacagagcctcctggccctgccctgagtgaaatctctacttcaagatgctcactttgctgggctggccctgaaggacccccgagtacagatggacggggttttcttgggttggtggaagaggggaaaggcctgtgaggctgagtctggcggggaacacttccggagggaagagtggggtagggggagggcagaagtgtcaccatgttggcatgaggagaggctgcaggggccagaggtctgttttcagcatcagtttggggctgaatcagcaatgggctgagctgtggggagggggaggtggactgcagggagggggaggtggactgcaggatggggtaggggtccttaggccactttctgttgaggagcaggatggggtgggggtccttaggccactttctgtgaggagcaggatggggtgggggtccttaggccacttcctgtgaggagcaccgggcaggggcatgcccctgatggtctttgcttccacagggagtggaattttgggacagactttaaaacagaccagagaaagaacttcccagcgtggagctgtggggtggatttgggaggggaacagagagtgctttctttgtgtctgtctgatggggctctttctgaaggggctgtggatggcttctgttcccatagaactctctttccccaccttgccaagattcttccagctgcaagtgacagaaaggcagctcaaatggtctgaagcctcaaaatggatttgctggtgctcacaactgagggacagtttcaggtgtggctcgatccaggcatttgaacaatgttggaaagacttgatctttcacatctttgactcctgctctcctcagcatagctccatttccactggtttccaacccccctacattcttagccctcacggtgggggctgtctccacagctctggaggagaacctgggtagggctctcattggcccagtgtgggttacacgcccatgtccaatccagtccttgtcctcagggagatgtggtgccatttctagaagatgtggatgctgggtaggccctccctgccctcctgcagacatctgctattctgatcagcttcctgtgcccctcgacaggcctggccagctcccacctgtgtgttcctccctggcaggtgtgccacagacacaggtgtggtggggtctctacccctctggaggctgcctgagccttgggtggtaccaagaagggctgggaacccttcctccaggccgagtgtggtttcagccctgcaaagagcacagagggatcccagttctccagggctctgagccgggctccggggtgggtgtggccttgaggttgcagtgagaggccatgaccacaccccttgttgagaactgggagctggaggacaggctggtggtggagagctgggcagatccctgaatgcctggatcccatggagggcgtctggggtgggcttcctgatgggccccacaaagcggcttcctgatgggccccaccaagcagcttccagaccaagccagggccagagggtgtcaggtggtcctgtgtgcccagcagggagctgaggccactgcaacaaggggctgcataaccccgtgtccctggctctccccacagcccccctcccaactcccaaatcccccggcgtcggagatgaggccccggatgctgccagtgttctttggggagagcatcaaggtgaacccggaacccacgcatgagatccggtgagtgggccactgggctctgcgcgggaggagggggtggggggttgggtgctggtcctgactctcttgtgggatgggggtggggactaggccaagctgggggctcaggaggctccctaccctccaggcagcccctctgggtgctgcttcctggggagtttggccgtatcttagccacagacaaaactgattttaagagactctgaccccaagggaccctctgtatccaccccacgcccccaccccaggtctattcagccgtttcccatttccccatttaccttctcctccaaaaggcttttattttaaatccaacctctcagaaaaaatggaaaattatgaacataaccacttgtgcaccctaactctacctcccttctcctgccagattttttttttttttgatgggatctcactgtgtcacccaggctgaagtgcagtggtgggatcatggctcactgcagcctcaacctcctgggcttaagcaatcctcctacctcagcctcccgagtagctgagactgcaggtgtgcgcccccatggccagctaatttttgtattttttgtagagatggggtctcactatgttgcccagactggtctccagctcctgggctcaagtgatcctcctgcctcagcctcctagaatgctgggatgacaggtgtgagtcaccatgcccagcccctgacagattgttaggtattcacaaccaaaccattcaggcaactcaggaccgccttccactctgttgtccaagcattaggggacagttgtccagctgctccatgttctttgtgactgtaacttaggttcttgaggccacccatgagctactgcactgtaagtgtattgggtgccctcccatgcatatgacgcatatgacatcttaggtggcatccgaattgaattaaggcacccctgcttgggaacatcccacatcgatttgccctcctctgaagctgctggggctcaggcttcccaaggatggagtgtgggatccgtgagtcttacccacatatctatggggctctctccatccactcgtccctgttgagtggggccagccaagtgtctgagacccactgcctgctgcccctgccagccaggcaatggtcccaggagacaaacgagtccacttctaaattatttttcaatccccaaacagccttcattgtctagtttttaaaatgcaagccaaaattagatcatcagaagcccagcaagggtggaggatggatgccttgaccctcgggacctctgatcccttcacaagtcttctgtgatcacctctgggggttcagtggggaatgagatggggaggattctctccttcccagagcttccagtctgatttcctaaagctctggacgtggaactgggggatactagtcggtcactcctccaagggtgttgaagggacttcttggaaaacgtattttgatataatttcaaactttttaaaaggttgcggctgggcgtggtggctcatgcctgtaatcccagcactttgggaggccgaggcgggcggatcacgaggtcaggagatcgagaccatcctggctaacacggtgaaactccgtctctactaaaaattacaaaaaattagccaggcatggtggcgggcgcctgtagtcccagctactcgggaggctgaggcaagagaatggcgtgaacctgggaggcggagcttgcagagagccgagatcgcgccactgcactccagcctgggtgacagagcgagactccgtctcaaaaaaaaaaaaaaaggttgcatgtgcctctcaaacagattcactggttgtttatatcttgccctatttgagaggagattggtgacatcctgccctttagcccccagatacttcagtgtgtctcttaagaacagggacatcctcttccatgacagcagcatagttgtcaacgtcagggaagtgcacacggtgacgccagcacctaacccacacgacacggctcagtttcacccatcgtcccgataaggtcctttcctggcttacttttctccccagttcaggatccagtcagggtccttcattgcgtttagctgtctcgcctctttagtctctgtgaagccaagacagtccctcagtccttctttgaccttcttgaccttgacatttcagagcagcccacacccgttaggcttcagagcatctgcccagggccctttcgtgtccatgctgagggcagggaatcgggctgcccccaatcctgggttcactccgcttccctcctgccctttccagctgcaactctgaggtcaagtacgcctcggagaagcatttccaggacaaggtcttctatgcgcccgtacccaccgtcacggcctacagcgagaccatcgtggcagcacccaactgcacgtggcgcaactaccgcagccagctgaccctggagccacgcccgcgcgccctgcgcttccgcagcaccaccatcatcttccccaagcatgccaggagcactttccggaccaccctgcactgcagcctgggccggcccagccgctggttcaccgccagcgtgcagctgcagctttgccaggaccctgcccccagcctcctgggccctgccacgctctgacggggctggggccggcccggggtgctggaggagccgggagccctggggagaagccgggaggatggacacgatgagctcggcctggcactcgggcaggaggcgggaagggaggctgccagaccaaggacccgtgtggaaggaggcggctccccgctgcctgccctgacctacaggctaggtggtggtctccttgttttggtgtcaaggactcagtaaaagcatctatttttttagcacttaagctggcaaggcggtaggggcatgcactgttaggtggtggccacccccagggtcaggggaaaagaatgggtccatggagtgcccttgaagcagagaacagccccgagcagtgtgaggacagaggcatcccagcctcagccggtggggacggctgccactcccccagagccctgccaccccatgtgtcctaggctggtggccaaggccatgtgtgagggaagaggggtacctctcttccctgctgctggcctggggtatttccaaaacagccttttcgcacacatgcaggttgcaccgagaggtctggagctgtggctgagccacctctggcggatgttgagccaggaggttgggcaaaggccggatgctgatgccagcgctggaggtggtgatactgggggcggggaaggcctagaaatactttgagccatggccttgccagtgtcccgtgccctccagtgtcaaagatttggggcactgcccgtcgaaatggaaaggttggtgctcagcctctggagcctcacctgcagggcgtccccagctaacacccatccacgcaccacctccaggacgagaacccttgatgtcaaaaccaagtgcccagtggaggcggtgaagctctcggaaatgctgccacctgtgtgaggccgggtctgaactcgagggagtcggagctcagctgtcggtttaaagagacactgaggggaccgggctgccgccctcagcctgcattcctgtgcgcaatcgattccgcaatgacagcaccttactccttcctgcggcaggctcacccctgcctgtgggatgttgtgagaggaacatgagccagacaaagacttggctcagggctccgtggaacaagccaggatgcacggggagctgggggagcccccagcctggggcagcccagcaggccgctgaacaaacaccccagaagccagcactgtggcagggtgctggggagatgcccctctgagccttcctcccccctcagacctgaatgcactccacagttgggggctgcccctgccactcccctggtaatgcataaaaggggaggggaaggttccctggggcttgagctccctctgtggaggtgaggaggggagattccgttcacatccaggaggggcaaaatgactgatgtatttttatgtatctacacagagagtgcattttctctccagagatgctgtctggttaacaaaggaataacttaagaaattgattgattatcttaataaactgtgcaaacccaacgggacttccttttctgtctgtgagaccttcagctcccgctggggttggggaaggggaagatgggtctccaggccccttttcctgtgtggccatcactttttttccactcggagcttgtgccctaaggagctggccttggccctgatcaaaggaacaaagaaggactcagcccccacccctgtagacagcctaagcgtacaccacctccacacgccagctccacccaagagctaattaataaatgcagaggcctgggacctacctggggactcagatctggggggcagctccttggatgggcccgggcatctgcactttggatggcgtgcatatctgcagctccatatcctggtcgtcagctctggcaagcccctcaacccacagcatccctggagaagggccctggctgccactgcggagcaggcggctgggacgcaccttacaatctgtttctctccatctcgcccttggagaggcccatggggctccatggagatagtgagtgtgttaaagggaacactcggcagccaggggacagtgagtcagactggaaaatcagactagaatttgctcccaggctctggagttggtgggggcaggggataagggagtgtccccagaggctgctggggacaggtcttccgaggggatgtgtcacaagagtgccatggtcaggactggtggtagcctcttgaggtccacaccctggtctggcagtggttaagctaacactagtgggaatgctatgcgtgctaattcagagcactcattggatttcaggctctgtaggaaacattgcatatgaaaacttgcatgccatccctacccgctgacatggatgcaaccgcatctccacttcacagaggagaaagtaaggcacagagaggttaagtcatttgcccacactggtaggatgcagctggtaggaggcagagacaggatctgaacccaagatccgggacactctaaaccaccggctgcctgctttgatggaggatggcccctaacagggaaggggggatggaagccagagaggctgagtccaacacaggttcacatcaactcgaggacgaatcttgaggcctccactggtctacacggacagaagcacgcctcaagacccgagccctgctttactcatgggattccctacagatgcctgctgggggtggcattctttgcaccttccttaatccatgcaaattcaactccacaagcctgattttcaatcacaaccttgatctctcaccatctcgaagggaaaatggataaggctttccgacacttgcaattatagtgccaatgaattcaacaaacatggaggttcccctgggatcggtcttgcgctggagctcaggtggagtccgttgaaatcgtcagctctgcgtggcctgccagactcttcctgtcccgtcccgttcctcactcccctttcacaggcattaccctgcaaaacctcttaccctcctaactccatctcagcccgtttcctggagaac

SEQ ID NO: 688 - DNA, 49793 bp, Homo sapiens
  source 1..49793: mol_type = genomic DNA
tggattaccttatggagaaaaggtttatgaatttgacaatttatgtcagtcagtaccttaaactgactccaggtgagtttcctgctggtgaaaatgaaggtctggggctgggcgcggtgtccttgtctctacaaaaataccaacattagccaggcatgatggcgggtgtctgtaatcccagctactctggaggctgaggcgggagaatcccttgaactcggaaggcggaggttgcagtgagcggagatcgcgctatcgcaccccagcctgggcgacagagcgagactctgtctcaaaaaaaaaaaaaaaaaaaaaaaaagagagaatatgatgaaggtctggaaggagagagtgttgccacactatgcagacaggacaggaaggcatgttgagagcctagagttaaatccttcagtgttcaggcctcatcaccaggttctgatcggttctggggctctgtttcagcagtcagaacctggctcccaagaatctgtttaacctcctgaatagggggtttcctgctgaacagtggctgaaaaactgcttctctgagctagttcatgtttttgcttttcttctcttttgattccttcatagaatattgctgccatataattccagtttttccacacatttaacaattttattccattgttgctgtgtttttattttcttggtgaaaacgagtagactccagggcgcggtagctcacgcctgtaatcccagcactttgggaggccgaggggggcggatcacgagtcaggagattgagaccatcctggccaacatggtgaaaccccgcctctactaaaaatacaaaaattagctgggggtggtggcgcgtgcctgtaatcccagctactcaggaggctgaggcacgagaatcgcttgaacccagaaggcggaggttgcagggagccgagatcgcgccactgcacttcagcctggcgacagagcgagactccgtcaaaaaataaaataaaaaataaaaaaataagactgagagatcaggtgggagaaaggcttggtcatgcagccagcagcttcatcccaaattcctgatccctggaggacatcagaccccctctcctactgcagtgtggcctgtgtggcctcggctccccttctgctccgaggccaggggatgtctccactggacagtgagtctgggattccctgcacacagttgtgaccccccagtcccggaggaagaagcaggaagggctcgcagactattggcaggaattcttcttaaatgcagatattccccgggaggggtcaggtcactgcccagggaggaaccccccctcccccgcccgccccatgccaagagctgtgtctgcaacctgttcatctggctccactcagcactgggagatcacttcttctgtcgctcagtgcctagggggcgggacctggagtactatccaatcagagccgctgggcggggccgtgagaactgtcaatcaggcgtccaggaggctggaggatgcgaggttgaaaaagcccgcggcgtcttctctgtcacccgcgctcggctccctgctcggtcgggctggaacctgtactggcagccggaggtgtaggtaggaaccggaatacctcggaagccgggaaatggtgagtgtccgaggccggggttcccgagacagggtacagctggttgtaaccgaccggaaccggctgtggcgggacccagacctcctcgctgttgtctctggggtctgaggacccgagtgccctggcccagctcggtcctcggtcctctcggcctcagggtggggctgggcctgcagccaggactccgggcgtcctgtccggtccccgcgcggcaactgcggcccaggttccggagtcctctctgggcagctccgcgtccgcagccccgcgtctccctagattgtgcggggacacgggagggtcatggggggaatcctcctcgggtgtggggttcatgtggaaggagcagcggtctgtggggtccccagttcctcctttgtctccaaggggctcgagtttttactgagatatccagatatatgcgaagcagggtctcaaatccgcaactgtgatccctggcctagcttctcctagggctgccagcaaatccctggatttccagatcccgctccgcgttttagagctggcctcctcttcagttcaccacaacaatgtcaactcttcgtcccccaggctttgtttcaaacatagccatatatatgtgtgtgtgtgtgtatatatatatatgtgtatatatatatatatgtgtatatatgtatatatgtgtgtgtatatatatatatatatatatatatatattttttttttttttttttttttttttttttttttgtgacagagtctcgctgtgtcgcccaggctggagtgcagtggcgcaatctcggctcactgaaacctccgcttcctgggttcaagcgattctcctgtctcagactcccgagtagctgggattacaggcgcccgccaccacgcgcggctaattcatgtatttttagtagagacgggttttcaccgtgttggccaggctggtctcaaactcctgacctcaggtgatccaccctcctcagccacccaaagtgctgggattacaggcatgagccactgcaaccgtcctcacacgtttttcatgtatatatgaattatatatatattaaatatatatatataatttttttttttttggtggagacggagcctcactctgttgcccaggctggagtgcagtggcacgatcttggctcactgcaacctctacctcgcgggtctcctgcctcagcctcccgagtagccgggactgcaggcgcgtgccaccatgcccggctaatttttgtattttagtagaaacggggtttcaccatgttggccaggctggtcttgaactcctgacctcaggtgatccgcccgtctaggcctcccaaagtgctgggattataggtgtgagccatggcgcctggccacacgcaatattttaataggcttttttttttttaagagggcaaaatatggctctttttgtaaagatttgttgtgtgtttgtgaacatttcacacttgaggaagcggagaaaaagcacctgacacttgctgtaaacaatctttatgcctctcctccttttatctgcccgaggcacggacaccttctgagaatgtctttgggttgaggtttatctttggaaactttacagggcgatgtgtcctcaactcaccctccatcttatcctggtcctgggtttcagaactgcctggggctgactgaagatgcccacagctaccatgtttcttggagggtgggtcactcctcccagaggacaacctgaggcgtggagttggggcttcccaggagaggagctaggtgccctggggtgggagaagtcccctggtattcccctccttaaaaagctaatcctgggccaggaacagtctctcacacctgtaatcccaccattttgggaagcctgtaatcccaccactttgggaagccgaggcgggtggaccccttgagtccaggagttcgagaccagcctaggcaacatggcgaaaccccgtctctactaaaaatacaaaaaaactagccgggtatggtggtgcgtgcctctagtcccagctcctggggaggctgaggtgggaggatcacctgagccagggaggtcaaagctgcagtcagctgcgatcgcaccactgcactccagcctgggcaactggagtgagacccagtctcaaaaaaaagctctaatcccctgggacactcagcttttcttccccaaatccagattccattccttggggacacttggctcatcagccagttggatggtggtattgaagggacaggacagaaatgattcctgttttctggatgctctcagcatagttaagggagaaaactattcctaaggacaggaaaacccaccccactgagatggtgcaagaacctgaaaagcaaaatgcactttaggaacacaggggacgcacaatgtgtcgtctcctgggagggtggtcactgagcacttcagtgagcaggatggggatgggggatgcccctggtgacaggaggatacgatgtgacacttgagttagacttgtctgtgttctaggtccttactgtctctctctgggcttgtcaccttgcaaagattggttcacctatttcagctgcagattaaatctctacttttggaagcttttcaactatcttttggttatcaatttctagtttaatatgatttgattgcatactttatagcatttctgttcaatttgttaaggcatattttatgcttccagtgtagtttactgtggtgaatatttcatgtgaacttgagaggaatgtgtattctgctggtgttgaatgaaggattctataaatacatattaattaaatgcagttgattaattgatacagtttggctgtgtccccacccaaatctcatgttgaattgtagttcccataatcctcacctgttgtggaagggacctggtggagataattgaatcatgggggtgtttttccccatcctgttctggtgatagtgagttagttctcaagagatctgatggttttataaggggcttccttcttcgctgggcactcgttcttctccttcctgccaccatgtgaagaaggacgtgtttgctttcccttccgccatgattgtaagtttcctgaagcatgtctttattagctgaatgagaacggactaatacattattgatgctgttgagtttagctatatcattagtgatttttttgttgtattgacctattaattatggatagaggtgaactgttggcttccaactataattttggatttgtatattttgtcttatagttttatgtttttgtcttgtatcttgatgttatattttatgggcatacatataagtaataaagattattataccttatgtcttttttttttgagacagggtccccatctgtctcccaggctggagtgcagtggcacaatcacagctcactgcagctttgacctcccagtgcccaggctcaagtgatccttcagcctcagcctcctgagtagctggtactacaggcatgtaccacgatgcctagctaatttttgtttttttttgttttttttttgtagagacaaggcttcgccatgttgcccaggctggcctcgagctcctggactcaagcattctgctcaccttggcctcccaaagtgctgggattacaggtgtgagtcattgcgcctggtcctattatgtcttcttgcaggattgacctcttcactgttacaaaatctcttttacaaggcaatgatggtccggcgtggtggctcacacctgaaatcccagcactttgggaggccaaggcaggtggatcacctgaggtcaggagttcgagaccagcctggccaacacggcgaaaccctgtctctactaaaaatacagaaaatagccgggtgtggtggcagtcacctgtaatcccagctactcgggaggctcaggcaggagaatcacttgaacctgggaggtggaggttgcagtgagccgagattgcaccattgcactccagcctgggcaacagaatgagactctgtctcaaaaaaaaaaaaaaaaagcaagcccaaggcaattatgaggaaaattccttgccattttccttgatctaaaatgtggtttgtctgagttttataaaactattgcacatttcttttgattagtgttagaatggcttatctttcttcatacctttttatttaatctattcacttctttttgtttgaaatgattttcttgtacacattactgaggcttgtttaatctactatgtcaatctgtgtctcttttttgtgtatataagtaacagacatttaaagtggtaattgatataattgtattaatatgtatatatgtaattgttctctgtttgttgtacttgttttcttctttctttctttcttttttttttttagacggagtttcattcttgttgcccaggctggagtgcaatggcgcgatctcagctcaccacaacctctgcctcccacattcaagcgattctcctgcctcagcctcccgagtagctgggattacaggcatgtgccaccatgcccagctaattttgtattttttagtagagacggggtttctccatgttggtcaggctggtcacaaactcccgaccttaggtgatctgtccacctcgaccttccaaagtgctgggattacaggcatgagacactgctcccggcctcgttttctatttttaaaactttctctttttctaccttctgtagtttttgcttgtttgtttgtttttttgagatggagtctcgctctgttgcccagcctggagtgtagtggcgtgatctcatctcactgcaaccttcacctcctcctgggttcaaatgattctcgtgcctcagtctcccgagtagctggtattacaggcgtgcgccaccatgcccggctaattttaataattttagtagagacagggtttcgccatgttggccacgctggtcttgaactcttgacctcaagtgatccatctgcctcggcctcccaaagtgctggcattacaggggtgagccactgtgcctggtagtaactttttcaaagtatgtttacagagatgtattccctgtcctctctagtcaatgaaggctctgttcctttaacttgtgttcatctagtgttttgagagaggtttcctgaatgctaggagctaaaataaaacagacctggccgggtgctgtggctcatgcctgtaatcccggcactttgggaggccaaggcgggtggatcacctgaggtcaggagttcgaggccagcctggccaacatggcgaaaccctgtctctactaaaaatacaaaaattagccaggcgtggtggtgggcccctgtaatcccagctactggggaggctgaggctggagaatcacttgaacctgggaggcagaggttgcagtgagctgagatcttaccactgcactccagcctgggcagcaagagcagaactctgtctcaaaaaacaaacaaacaaacaaacaatcaaacaaaaagaggcccaaacctgacttcttccaggctttgtggatggctttgtcgtgcagcattccttgaacactcggcctgagttttgtttgttttttttttttttttgagacggagtctcgctctgtcacccaagctggagtgcagtggcgtggtcctggctcactgccagctctgcctcccgggttcacaccattctcctgcatcagcctcctgagtagctgggcctacaggtgcccgccaccacacccggctaagttttgtagttttagtagagacagggtttcaccgtgttagccaggatggtctggatctcctgacctcttgatctgcccgcctcagcctcccaaagtgctgggattacaggcgtgagccaccgcgcccggccgactgtttaaaactctgcgttagcctccaatttctgctgaactgagcctagagatcagccagtgccgaaacttagggcctcctcaggttttttctagaaatgtgttatttcctgggcagacgtgaggctttctcaattccccaggataccaaagtgcttttgattagcctaatttctgaagctaattttctctccagattgttttcctgggtcttagatggtctattctgtctcagtcatagactgttgttccagatggttgcaggctttttgttgacaatatttttatgtagtccctgccaatttttgaccccagttaggctttagtgtagttgaaacagagaagagagccttatttcagacttttcgtaggcccaggagaaattggagtatatgaagataatatttgcaaataaatataatatttgcaaataagatggtagaataggtcaccgcacctggcctgttctacattttcacttacctttttctctttgttcatctttctgtcaacagtgtggtgtgttgaatattatagtttcaaaatccttcatgtgtgttaggtaagctgtcactttctggtttagaagatttttagcatttttagacatttgttacctccattagttttgtttaagtagcttttattgactactaacaggtctgttttaatgatttaaggaatttcataaatattcatgagagatgacaccttggtgacatgcagttcttttttttttttttttttttttgagatggagtcttactcttgtcgcccaggttggagtgcaatggcgcagtcccagctcactgcaacctccacttcccgggttcaaacgattctcctgcctcagcctcccgagtagctgggattataggcacctgccaccacgcccggctaatttttgtatttttagtagagatgggttttcaccatgttggccaggctggtctcgaactcctggctttgtgatctgcccacctcggcctcctgaagtgctgggattgcaggtgtgagcccctgcgcctggctgacaagcggttctttagaagaacgtgtacaatctttatccatctttcattctcctttgatgttacctagtatttaaaaattttcctttaggatgatgaaatacatttcattaaccttacgttacacttcattaaatttagtttacggaaaaccggttgccagcttccaggtgttctcttattgtaatcacatagaatgggctaaatcccccaagtaacaagtgttgacagaacatatgaaatgttacgtaccaaggtcactcagacacttagtacccagagtttttttttcatggccatcttagtctgttttatgttcattagaatagaatgcctgaaattgggtaatatacaagaaatgatatttgttttgtacaattctggagtttgggaagtctaagggcacggtggcacatctggtgaaagccttgctggtggggactcttcactatctgaggcaatggaagaagggtattcctaggggagggggtgctagcttaggggtctcttcctcttcttctgaggccaccagtcttactcccaggatatctcatttactcattaaccctttcatccatcagtgaatgaacccattcatgaggcagagccctcatgacatagtcacctcttcaaggccccacttttgaatactgacaccttggggataaagtttcagtatgagttttggaggggacaaacattcaaacctagcagtgactgatcaggtatgcttctctgctgattatatcacaaaatttcaaactctcagaaggatgatggaaattaagcaaataccatattatttacttatttatttatttttcaatttaatttgagacagggcctcgctctgtcacccaggccggaggtcagtgtcacactcatggctcactgcagcctctacctcctgggttcaagcaatcctcccagctcaacctccctagtagctgggactacagacatgcgccattatgcctggctaatttttgtatgttttgtagagatggggtttcaccatgttgcccaggcttgtcctgaactcctgagctcaagcaatccactcgtctcagcctcctaaagtgctggcattacaggtgtgagccactatgcccagtggcaaatatcatattgttttaataaatagttgaggcacacagctccttttctttgttatgctggtgcagctctccttaaatctagctctgagataccatcatagttcaactttctaaataaacgtgtgtagggatatgttgtcttagagctgctaatattgtctcttgtagacaacacatagtaggactttgtcacgagagttagtatagacccactagacagaaagacactagaggtgatctgggcagcatatctcaactccctgaaatcatgaatgagaggcttgtccgtattggctattactttactgaatgtgttcaattctagcatcagaattgctgtgctggagaaaatgagtatagacagaggataagagtctgatgaccaaatcattgaataaatgtttggagtctatagcattgtgtgaacttcctctagagtgtagcttcctagtgctgtcagcctgaaccttcctcctctgccatgtgggatgtttcaggactcaatgatctttgaggatgtggctgtgaactttacccaggaggagtgggctttgctggatccgtcccagaagaaactctacagagatgtgatgtgggaaatcatcaggaacctgatgtctgtaggtaaggatgacatcatttcttcacttagtcaattacagaacaagtgtttcttggtcatctacactgctcaatgatttgaaacatggtagggaatacagtagactggcctgatgcagtggctcacggctgcaatcttagcactttgggaggccaaggtgggtggatcacttgaggtcatgagttcgagaccagcctggccaacatgatgataccccgtctctactaaaaatacaaaaattagccacgcgtggtagtgcacgcctgtagtcccagctactcaggaggctgaggtggaagaattgcttgaacttgggaggcagaggttgcagtgagccaagattgtgccactgcactcaagccttggccacagagcaagactccatctgaaaaaaaaaggaataccgtaaggccgggcatggtggctcacacctataatcccagcactttgggaggccgaggtgggtagatcatgaggtcaggagattgagaccatcctggctaacatggtgaaaccccatctctactaaaaatacaaaaaaaaattagccgggtgtggtggcgggcacctgtagtcccagctactcgggaggctgaggcaggagaatggcgtgaacccaggaggctgagcttgcagtgagccgagatagcgccactgcactctggcctgggtgaaagagcgagactccgtctcaaaaaaaaaaaaaaaaaaaaaaaagaatacagtagacccttgaacaaagtgggtgtcagagactcttaacctctgcacagttgatgatctggttttaacttttgactctataaaatgttaactgttggccgggtgcaggggctcacacctgtaatcccagcactttgggaggccgaggtgggtggatcccttgaggttaggagtttgagaccagcctggccaatgtgaaaccccatctctactaaaaatacaaaaaattaaccaagcatggtgccaggcacctgtaatcctggctactcaggaggctgagacaggagaactgcttcaacctgggaggtggaggttgcagcgagctgagatcatgccactgcactccagtctgggcaacgagagtgaaacttcgtctcaaataaaaagaaaaaaagctaaatgttaatagcctattgttgactggaagctttatcagtaacataaccagtcaattaatacatattttgtgtgttggtgtgtatgtgtaagtgtatattaggacagtgtctcactttgttactcaggctggagtgtaggggcatggtcatagcttaatacaacttagaactcctggggtcaagcaatcctcctgcctcagactcttgagtagctaggattgtaggcaagtgccaccatgctgggctgatttttaaattattttttgtggagatggaggtcttgctatgttgcccaggctggtctcaaactcttagcctcaagcagtcctcccacctcatccctaagtgctgggattataggtataaaccaccatgcctggtctgtttggtctattatatatggtattcttataataaagtaagctagaaaaaagaaatattatcaagaaaatcataaggaagtgaaaacatattgacttgattaagtggatcatcctaaaggaatccttttcattgttttcacattgagtagcctgaagaggaggggttggtcttgttccctcagaggcagcagaggttgataaaagtttgcatatgagtggacttgtgccatgcaagcccattttgttcaagggtcaataatattttggtgaataagtcaggcatggtcacagtgtcccatgaacatagaatctaaaatgtttctataattttgtaatcatttatcatgacttttatgggtctacattttaggaataaaatgggaagaccggaacattgaagatcagtacaaaaattccaggagaaatccaaggtaatttgcacttataacatgaagctgtgtcccttgagataatgttagagtgataggaaattatatttatttacttatgtattcatgtatctgagacaaggcttaatctgtcacataggctagagtgcagtggcatgatcatagcttactgcagccttgaacccctggactcaagccatcctcctttcttggcttcccagaatgctaggattacaggcatgagccactgtgcccagtggaaatttaaagaacaagcaaacaaagtgaagcagcccagcttcaaatttgttaatttttagaatgttttctccaaaaatatatacttaaatacatacacattcattgtttgcaaaatagttgccttggaaacagtattaagaaatcccatagtggccgggtgcggtggctcacgcctttaatcccagcactttgggaggctgaggagggcggatcacgaggtcaggagatcgagaccatcctggctaacatggtgaaaccccatctctactaaaaatacaaaaaaattagctaggcatggtggtgggcgcctgtagtcccagctgcttgggaggctgaggcaggagaatggcgtgaacccaggaggtggagcttgcagtgagccgagatggtgccactgcactccagcctgagtgacagagtgaaactccgtctcaaaaataaaataaaataaaaaaataaagaaaccccatagtggccagatgtggtggttgatgcttgtaatcccagtactttgggagtctgaatgggaagattgcttgagcccaggagtttgagaccagcctgggcaatgcagtgagaactcatctctacaagaaataaaaaaaatcagccaagcctggtggcgcatgcctgtaggcccagctacttgggaggctgaggtgggaggactgtctgagcctggaaggtggaggctgcagcgagctgtggtcataccactgcattccagcctgcgcaacagagtgagaccctgtttcaggaaaaaaaaaaaaaaaaaaagaataagaaaaaagaaactgcctagtaacatcactgttttgataatagctgtaatagagcccctttgcagagaattcagtccactcactgtcagacacttcagacagaacataaagcctacatttctcatgataatgtaaaatatgcaaatcaaatgcttgctaatataaaattatttatcaacaaattctttgtaatgtgcttcttattttttatagaaatcatatggcagagagactctgtgaatgtaaagatggtcaatgtggagaaactttcagcctgattccagatggtataatgaacaagaacactcttcctggggtaaaaccatgtgaaagcagtgtgtgtggagaaggcaacgtggatcattcatctctgaattgctacatcagagctgacactggacacaaaccgtatgagtgtcaggaacatggagagaagccacataaatgtaagcagtgtgtaaaaaccttcagctgcctccactccttccaaacacatgaaaagcctcacacaggagagaaaccctatgattgtaaggaatgggaaaaaaccttcgattctccccaaaccgttcgaagatacagggtagtgcacagtggagatggaccttataaatgtaagttttgtgggaaagcctttgataatctcagtttatatctcacacatgaaagatctcatactggacagaagccatatgaatgtaatgaatgtgggaaagcctttggttttcccagctcctttcatagacatgaaagaatgcacaccggggagaaaccatatgaatgtaagcaatgtgggaaaacctttagttgttccagttccattaaaaaacatgaaagaatccacactggagagaagccctatgaatgcaagcaatgtgggaaagccttcgcttcttccaattcctttcagtatcatgaaaggactcacactggagagaaaccctatgaatgtaagcaatgtgggaaagcctttaattgttccagttcccttagaaaacatgcaagaattcacactggagagaaaccctatatatgtaaacaatgtggtaaagcttttagatttcccagttctattaaaaatcatgaaaagactcacactggagagaagccctatgaatgtcaggaatgtgggaaagccttcagatattccagttcacttcgagtacataaaagaattcacactggagagaagccgtatgaatgtgaggactgtgggaaagccttcagtcatcccacgacctttcatagacataaaattacccacactgcagagaaaccttatgaatgtcaggaatgtggggaagccttccgttatcctgttgcttttcgtagacataaaattacccacactgcagagaaactttgagtgtaaggaatgtgggaaagccttctgttatcacagttcccttcaaagacatgaaaggactcacaacggagaaaagttgtgtggatataaaaaatgtaaagccggctgggtgcggtggctgacgcctgtaatcccagcactttgggaggccaaggcgggcggatcatgaggtcaagagattgagaccatcatggccaacatggtaaaaccccatctctactaaaaatacaaaaattagctgggcgtggtggcatgtgcctgtagtaccagctacttgggaggctgaggcaggagaattgcttgaacctgggaggtggaggttgcagtgaaccgagattgtgccactgtactccagccaggtgacagagtgagactccgtctcaaaaaaaaaaaaaaaaaaagtaaagccttccactattccagtaccttctgaaaccatgaaagaactgacacttgagaaaaacaatgatgttaggaacatgggaaacctttcctttctctctcaatcgtttgaaggcatatggtgtgacatgctggcgatagacctcataactgtaaggaacatggaaaacgattcttgttttccatgctccttgtttattttagatacatgaaagaatttactctggagagaaactatgagtgtaaaaaatgtggtaacgccttgtgtagtttctgtttctctgaaatactgtcatgtcctggtattctcaggggattagttgcaggcaccccgctccccacttcagaacatctaaatctgaagatgctcaagtgctttatataaaatggtgtattttcctagaacctaagcacatcctcttgtacactttaaatcatctctaggttatccatactgcctaatgcattgtaaacgatataaaaatagttgtttcattgtgttatttagggaatgctgacaagaaaaaacatctgtagatgtttaatacagataaccatcacatgcccacctccatagtacaggcccacctcatagtatatgtcagctacaatgaaacattttcttttttttttaaaaaacgttttggattggtttcatttaatggcctcaaaaacacgtgttaacattctccaaatccttggttcttctctcctgataaccctcatgtgatgattgctctgtggttcctaaagctgcagtgtgttgaggtgcttagatatgtggcagtgtagataagtcaggggacatcagtttaacttgaattttctttttttttttttttgagatggagtcttgctctgtcacccaggctggagtgcaatggtgtgatctcggctcactgcaacctccacctcctgggctcaagtgattctcctgcctcagcctcccaaccagctgggattacaggtgcccgccaccacacccggctaatttttgtatttttagaagagatggggtttcaccatgttggccaggctggtcttgaactcctgacgtcgtgatctgcccaccttgacctcccaaagtgctgggactacaggaatgagccaccctgcccggccagaattttctttcaggacatcaggaggatcctctgctggaagaaccaacatctgattgcagatgttgcctctttggtggaaggtcagtaacacaaatcttggatctgtggtgtttgagggctgaaaatatttaagcatcgaactttcagtcctttttttttttctttttttttgagatggagtctctgtcgcccaggctggagtgcagtggcacgatctcagctcactgcaacctctgcctcccaggttcaagcgattctcctgcctcagcctcccaaatagctgggattacaggcgcacaccaccatccccagctaaattttgtatttgtagcagagacagggtttcatcatgttggccaggctggtcttgaactcctgatctctgatgatctgcccaccttggcctcccaaagtgctgggattataggcgtgagccaccgcaccctgctgaagtttcagtcttcataattgcagatgctttagttggaaacgttgtcataggaaaagctgttttttctttctctttgaatcatcaaacacatcttgcaatggttttggccatgttatctctggtgacctggaagcgactttgatattaagcttcagagtatgctgaaacaagtcaagacttttggtgatgttaggatggtaagcatgtattttgcatgtgaggtcataaatttagggagcaggtagaaaattattgctttatttgtcccctgaaattcatattattattatttttttgagagagttttgctcttgttgcctaggctggagcgcaatggcacaatcttggctcaatgcaacctccacctcctggtttcaagcgattctcctgcctcagcctcccaagtagctgagactgtaggcatacgccaccgtacccggctaattttttgtatttagtagagacagggtttcaccatgttggtcaggctggtctccaactcctgacctcaggtgatccatgcacctcggcctcccaaagtgccgggattatagagatgcgccaccacgcccagccctgaaattcatattttgaaaccttactccctaatgtatggaatgaggagataggatgcctgggaggtaattaggattacttgggatcatgagggtagagttctcaggaatgggactataaggttccctagagagcttgcatttgctctctattatgtgaggacacaatgagatgaaagccttctttgaacaaggaagcttgcccttaccaggcactgaatctactatcactttgatcttggagttcacaatctcctgtatactgaggagcaaatgttaggtgtttaatacacccagcttatgtcattttgttttaggagcccctggtggataaagcacaaccccattaaaaaataggtgaaggagttgaatagacatttctctaatgaggatgtacaaatagacaataattacataaagaagatgttcagcatcactcatggtttagggacatgcaaatcaagagcaaaatgacatctatatcccctcaccctcattagtttgcttctgtccaagaacaaaataacatgctggcaacgatgtggaatagtgaggacccttgtacactattgatggaaatgcaaaatgtcacaactacttttgaaaactatatggcaggccgggtgcggtggctcatgcctgtaatcccagcactttgggagcctgaagtgggcagatcacctgagattgggagttgaagaccagcctgaccaagatggagaaaccccatctctactaaaaatacaaaaaaattagccgggcatggtggcccatgcttgtaatcccagctactcaggaggctgaggcaggagaatcacttgaacccgggaggcggaggttacagtgagtggagatcgcgccattgcactccagcctgggcaacaagagcgaaagtccatctcaaaaaaaaaaacaaaaaaacaaaaaaaaaaacaactgtgtggcaggtaatcaatacattgaaaaaatggaaataacatccaccatttttcccttctgggaatataagcaaaagaatagagacgggggcctgaaatgggtatttgtatacatggtatagcagtataacttaccaatagggaaaatgtggaagcaactctcttgtatattgacagatggatgaataagcaaaaggtagtatatgcataggatagactattactctgccttcaaacggaagggtgacctgacaaatgctacagcattgatgaacttggagcacattatgctaagtgaaatagtccattcatataaagacacaccttataaggtcgagtcacttgattttttacaacctgtctccagacatgggctccttaaactccagacccaaaatgtttttgcttatatgaggtactcagaggagtcaaattcataaagaaagtagaatggtgattgtgtggaataggggaagtgggtaatggagacttatgatttaatggcataaagtttcaatattgcaagatgaaaagggttctggagatagatggtggtgatggctgcacaccaatatgaacgtactgaaagccagtaattctacacttaaaaattaagatgggccgggcacagtggctcacgcttgtaatcccagcactttgggaggccgaggtgggtggatcacctgaggtcaggagttggagaccagcctggccaaaatggcaaaaccccgtctctactaaaaatacaaaaatgagctgggcatggtggtgcatgcctgtaagcccagttactcaggaggctgaggcaggaggatctcttgaacccgggaggctgaggttgcagtgagctgagattgtgccactgcactccagcctgggagacagagcaagactccatctcaacaacaacaacaaaaaattgttaagatgataaattgtattttttctgtattttagtaccattaaaatacgtgggattggtcagagtggtggatagggaaaggacgcaaaccttctgagaggttggaaggttctgcagagccctgggggagaatagctgaaggtggctgttctataaccctgaggcagagggcatggagtaggtacaagggagtgtgggggaatttatcttaaacaggcttgtttacttgtgttgaccaggaactgacctttcatcatccctgtgcctgacgttccctgaaaggggaacaataagtgttaattacctacaggttgtgttggctccaggtttttggcattgtgcctagactgaataaaagcaagcagctccagcttcttggggctgctttctggccactagagccaggcagtcacctagttgctgttacactgaatacctgtgtctgagtcctcatttcatccgttggccagggtctgcaggacagacccggcattaaaagagtggggagccacagtagtgcaaagaccccactggaccaccaacataccaagcagttcttggttcaatccctccttgtcctcaacactgtttttccattttccttgtccataaaggacctgtttccacatgcttgctttgactctgatgtcacctttagagttgatgctcaggcatagctcacttaactgcctcaccttttctctcctgatctggttgttgatggctgttgtgagacattggttgttgcctttttagtttaaaaggattcaaatgacacacagcaatggagatgcagtatatggcaatttattgcaaacgaaaaagtattttgaaagttaagtgcagaacagacagtatgccctgagagagagaggaggattcagggcaggctgctcataaggatgagacagcaaacagtggcactagggagactttttaaaaaaattttaatagttagatttcagctcttttgagtggtttcaagtctgctgtggaggaagggggtagggggaaggtgggcatagcccgagaggcaacagactccagaacattccagacacagtccttcagaggctggctagtattaaggaaagtggttaggtttgtgaggtgaaacagtggatgcttgtggcttttccgcagtgtgtgcagtcaggccagcttgacttggaggaaagccattcaacacaaaaatggcaccacagttaccctggaggtaactgtgaagcacagggtttgagccacctccatcatcctcagggcactgtgtgtttcaggatactctgtggcactgctttcttttcttttcttttcttttttttttttttttttggacggagtctcgctctgtcgtccaggctggagtgcagtggtgcgatctcggctcactgcaagctccgcctcccgggttctcgccattctcctgcctcagcctcccgagtagctgggattacaggcgcccgccaccgcgcccagctaatttctttttgtatttttagtagagacgaggtttcactgtgttagccagggatggtctcaatctcctgaccttgtgatccgcccgcctcggcctcccaaagtgctgggattacaggcgtgagccacagcgcctggccgagagactccttttatgggaatcttacatgattattcataaggggctgggaagaggtgttactagtaagcacattctgggtggtcttctgggtgcacatgcacagtagctgcccattcttgttcatacgtcacatctcattagcatcttaaatctccacccagggatgtggtttttactattataatgagcaaagggtcaatctgaagacaggtaaaataaaaatacgcgtgctccctacaggggaaattccctactggagagagctttgcttgaatgagcttgactacaatgcgaatgctgaggcttattgtgttgactgtacgattgccaagtctccaggacatggttacttccttggctacctatcctgtctcatggtcctcagtcacttcacacccatgatgtatgctaacacccttcggttatctgtttagaagggataattattatttttttctttttgagacagagtctcgctctgttgccaggctggagtgcagtggcacgatctcagctccctgcaacctctgccttctgtgttcaagcaattctcctgcctcagcctcccgagtagctggaactataggcatgtgccaccatacccagctaatttttgtatttttagtagacgaggtttcaccatgttggccaggatggtgtcgatcttctgacctcgtgatccactcgcctcggcctcccaatgtgctgggattacaggcatgagccaccgcgcccagtctagaagttataattttaactttccctgaagaacactcataaacataagttaaggattgcaatgttttgttcatgaacaaatcttccagactgtgagaattaagcaagataaactgaaaataataataatgcgatacagattttcctaactacagaaaattgaggaaacatactacaaaatgtggaatgactgacctttaattctacctgggctggaggttcaagaaatggacagaaggggtcactacatgcacaggaaagaatttcctaattttaccagtagagctgatgttgaaggagaaatatgtgctgtaacaagagaacttcaaagtaggatgaatgaaggaaatcttacccccctaataatatggaatttatgcagaatcaatttttacttcagaaggtcagtaaattctgctttcatccaatgtctttacatgtagaattatttttcattatcattgttcttaccttttgtagtgattactctgttgtttatcaagtaaatgataacccgttaccatcagcatcacttttcttgtgatatatagctaactttcagtgatgtacaaaaatatttatcaactatagctttcatatttttgcattcttggggtattttgttacatgtataacaactcttgagattccacacataacaatacattcttaggattattactttgccattggtagtcactgggtttgtccacttcctgtatggtgttatttgcaaatgaaatacacacatactacatttttatatgtggtaggtccaacaacctatcaactgattattttacaggtgaagaaatacacatttagtctgtcttttatagttataatattctttaatagtcatctttgttttctcttgttttttgccatcatttgatgtcagactgaagaactttctttggtctttcttgtaaggcttgtgtgctggaaataagttctcttagtatgtatgcttaaacctgggaaagtctttgttttgacttctgatttgaatgtgagctttggtggatatagaaatgttctattatatatgtttcagagcagaggaatagcatctaactaaaagcaaatatgtctatttcacccaaacacttatcattacactagtttatataagttaatgtcaaaaaacaatgagcaataaataggaataggatggaagaaggaaatattgtgattgaagatgaaaccgttgtttgggaaagtaaagacaaaacaactggaaaaaaattttaagctggggaaggaggcaatttgctgtgtatggagcaaacatactattgaattaaaatcacatttcttgaaaatgtatattaatttctaagaatagcactaataccctatgccgtatctgtggaaaggtatgagtatttcctgatgaaatgacctgagtgtcacctctatagatttatatataactttgatggattgaaggttcctcatcccagtcctcactgtagagaaatggtttaaatataagtaattcaggaatctgatccaaattaactcgtgtataatattccagaaaaattcacaacatcaaagaaatgttttgaaatttatacttttttttctgacagagggcctcactgtgtcacccaggctggagtgcagtggtgtgatctcacctcattgcagccttgacttagtggactccagaaagcctcttgcctcagcctcccaaatagcagggactacaggcataggccatcacacctgactcattttttaattttaatttttttttttggtagagacagggtctcactatgttgtccagtccaggctgcctcaaacccctgggctcaagcaatcctcccaactcagcctcccaaagtgctgggattataggccattgctcccagcttattttttatttattattattattattattatttttttttttttgagacagagtctcactcttttgcccaggctggagtgcagtggcgctatctcggctcactgcaagctccgcctcccggattcactccattctcctggctcagcctcccgagtagctgggactacaggcgcccgccatcgcgcccgattgaggttttgtatttttaatagagacagggtttcaccgtgttagccaggatggtctcgatctcctgacctcgtgatccgcccacctcggcctcccaaagtgctgggattacacgcgtaagccaccgcgcccggcctatttttaattttttttagtcatggtttagcttgatcacccaggctgttctaaaactcctgggctcaaaagatccttcccgcctcagcctccctctggggtagctgggaccacaagtacttgccaactcacccagccttttattatcagtgcctaatgcttaaggaggatgtgggctaccttttactttcagataaaaaacattgaggtgagataattctgttaattttttttaacacaaaggttcataacttgaataggtagtttcttgcctaaatcatttaattaaaaaatttcgttttcattttgtagtctcttggatcttggagttgattgaaatgtatttttaatagccaagtagattcacttttatatggttttaaaattgttgtgtatataaggggcatttgaaacattagatttttgtatttgctgtgactttcctactggccagtgtgccaggtaccggatatcctccgggaactgcaggcaggcccgtctctctttcacgggtgagagccgcagcctactcttggcggaagcggaaaccctttcctccatcacgtttcgcccattccaggccagaagcaggccccgctccttgctgctcgcctgtgagcatatttcgtcgaatcccggctgggcggcttggtcgcagtgtgcctgtgctgggcccggagcgcgttcatcgcccacagccgctccagttcttgcgagtggttgttcctgcacgccaggagccgtgggccgggccatcaggccatacaagtgctgcgaaagcggcctcgccttcggctgcatcatctcggggatgtttcacttgtctcttctcccagttccagccccagcccctcgaactcaccgggtctccacagcacactctgatcaatatcccacaggtgaggaatataaaatactctttataaagtggaagctagtaagtcgttcttttcaaactttcacaagaaactacagatctttttaaaagattctgattcagcaggtcattggggaaggcctgatcctctgcatttctgactcggtccccagtgtcgtccatgctgctggtccgcggaccgcagttagagtgctgaggtagtaatagacctggttaggcaggcaggcaggcaagggactgatcccatggagcctggtgggccgtattaaggacttttattggatttcgagcagagaagcgacgtttgggttgtgttttaagaagctacagaacaagttctgccaaagtggaagcaaagacaggttacccactcctcttttgcctcctcgcctcttgcctcgtcgcgggtgagctatgactatctggggcagtggtgcgccgggggtaaaagtatttaccaagacaattgtaggtaaaggaaggcaggtttatcggagaaagtatgaaaattcgttgcgaggcagcaacaggcaggtcagcagaagagaagctgaatgcagggaaacaggcttgctgaggattttatggactggaactttggctgattgataacgccaaggcagcagggggctaatttgcatttttctggccgctgtggtgtttgataaattgaagcgtttgttgataagcaggaagtttgagttatgtatgttatctgagcaggagggccatatgtcctgggccataaagcagacctataacttatctgcctctttttgtttatatgtcctggaccatgaagaaaggcagatttgtagcttatttactttatctctttgctttctgcggctctcgccagcctgatttttttctcccctaattaggactctgcgtgcctgattgcttttctctgccttccttacttgcaactcccaaggtcatgtgtccgtgagagtggacctaactcagccgctaactcagcctcgagctacacaaaaaagggactggactgggctaaggcttcaaaaaagggtgggccttgggtaagatgttccagctggtccagcaccctcctgtcccatttcccaggccctggcagtccagaattgagtaaaacatactgagataaccctccactggtgaacctggaggaagatccatcctgtaggaggtgagagcctgggaaaggacatcactatggagggaactgaagttggggtggaggtcggtggatggggtattggaagtggcttgagaccaggagatgagtttaaagtcctcaggtgcctgtgggtaaagttctgacaaaggaaccaggaagaaataagagtcagatgatgaaaaggatcaggactgggggaaaaaacaaggacccaacctggtgatcgggattaaacaattattctgggcaggcaagggcaagaaatagataataaactggaaaaagaaatcgctggtgtaggagggatatcagctgagaagagttggtccaaggctcttggtctacactccacatcctgtggggtgcacctggtgggcaactaggagagaagaagggcccgacgtccagtaagggaatcagaatgtgaatgccgtattgctgtggggaaggatcacaggccacctggagccacctaagtgaaaaccagggtcagtgcctggggatggaaggatctgaatggaaactcacttaaggccaggtggggtgacctgagtagcaaacaggtaaaagttgggtaggaggacctgatttggatggggctgctcactgtgatgtctatgaagctatcattccagctgctgtccacctaggagcagttggtcagtacagtcagctgcgtgttcccatcttgtgtatgagggcagtactgaaggctgcccttcatgcctgccttgatcactggcaggagacagaggacgtggaagtatgggttgtttggggggatggtgcctatgaggaaggtctgatcccaaatctagagaatgggagggtgggatgtatcatggagggtcaggccgggggtctggaggatatcatgtcctaaatgcagatgttctctgggtctcaggtccctgctaccagcccagcctggtgaggctccagatgagtcaataaccctggctcaggagagctggtgtaggatctgttaggccaaggggtctggcttccttactacctcccacttctacctctgtagaaatgtctgtctccagcatcatgtcaaagcaactgatgacttccctaccccaggcatcactgagctaaactgggtggcaggaaggtgatcaccacctaagtactatctttttttttattttgtattttgagacagagtctcactgtgttgcccaggctggagtgtagtggctccatcttggctcactgcaagttccacctcccaggttcacgccattctcctgcctcagcctcccgagtagctgggactataggcgcccgccaccatgcctggctaattttttgtatttttagtagagacggggtttcaccatgttagccaggatggtctcgatctcctgacctcgtgatccacctgcctcggcctctcaaagtgctgggattacaggtgtgagccactgtgcctggcccacccaagtagtatcttatcccttctctccttttcatcccagcctgtgcccactgatcgcttggttaccggtcccattatccactccagctcctggtacttctcttctgggtacagctgaaccacctgggaagagcaagctaagaagttctggtgccccccttgcagcaaggctatcagtgggcacaagaggatggggggatgggctggagtaagccctacccagagcaggagggagccccacacagttctccctcagctgttaacttcctagagacccacctcacagtcaagagcaccaacgggcactcctccctccactccccttactggggcaccagtttctttccaccccaggtgttcactatccccgttatttcaattctcatggctcacaggaagaaataggtatattgtactgagatttttctttctttttttttttttaaaaaaaaaagacatttattcagcatcacgatcagactattacatttagcaatcaacagcatggggtgcaaaaagaaatctacgttaaaaccctttgttggaatgctttacactttccacagaacagaaactaaaataacctgttatacaattagtcacaaatacagtcctcgagttttttgcccatacacatgagtatttgtctaaaacatgtcttctttgtagcagctaggccctgccaccactgtgcttggctgagttcacaaatctattgtaacctgtagcttccctgtcacttctctggctctcctctcctgctaagctttgtttcctaattaaaatcttctgccactgccatagctactgctgctgctggaaccgccatagccacttggtttcgtggttttgcaaagtattggcctccaccgccataggggccagagcttctgcctccaaaatttcctcccttcatgggtccaaaatttgaagactgattgttgtaattgccaaaatcattgtagcttccaccacctccaaaattgcttccatcattaccaaatccattatagccatccccactgccaccatatccaccaccaccatggctgccaccaaagccaccacgaccactgaagtttcctccacgaccgaagttgtcattcccaccgaaaccacctccacgaccaccaccaaagtttccagaaccacttcgacctctttggctggatgaagcactagccatctcttgctttgacagggcttttctaacttcacagttgtggccattcacagtatggtatttctgaatgacagtcttatccacggagtcatggtcgtcaaaggttacaaaggcaaagccccttttcttgccactgcctcggtcagtcatgatttcaatcacttcaatttttccatactgttcaaaataatctcttaggtgatgttcttcagtgtcttctttaatgccaccaacaaatatctttttcacagttaagtgggcacctggtctttgagaatcttctctggagacagctctctttggttccacaactcttccatccaccttgtgtggccttgcattcatagctgcatccacctcctccacagtggcatacgtgacaaacccaaagcccctggagcgcttggtgtttggatctctcattaccacacagtccgtgagcgttccccattgctcaaaatggctcctcaggctctcatcagttgtttcaaagctcaaccctccaatgaagagcttcctcagctgttcgggctctttaggagactctgacttagacatgacggcagggtgaagagagactttaacgatgcttcttcggcggtgtccacgggcagaaaagcgagatttttctaaatgacataaaaatatgtattcgtgaaacagtcttttcaagataaggatcccatccatcggactcaaacattacccgctggtccttggtaatcttgccccaccctagtgcttcttctctctcagccacccctgatggaatcctgcagtttgtactgttctgtgtcaggcatctttcactcagcataattgagcttcatccaatagttctttattgtacatgaataatattccatcttcagaggaagcaaaatttatttctccagctgttgatggatatttgggttaatttcagtttttggctattaagaattaaacatatgaatattcacataccagtgtttgtaagaacatatgatatttcttttttgtttgtttgagacagcctcgctctgtcaccaggctgaagtgtagtggcgcaatcttggctcactgcaacctccgcctcccaggttcaagccattctcctgcttcagccttctgagtagttgggactacaggtgcgtgccaccacgcccagctaatttttgtatttttagtagaggtggagtttcactatgttggccaggctggccttgatctcttgaacctcgtgatccgcccacctcagcctcctaaagtgctgggattacaggcatgagccactgtgcccagctgattatttctttagaagattttattttattctacctaggaataaaatggctgggtgttgtgacaggtgtatgtttaacttcttaggaaacttccaaactgttttccaagtggctgttccattttgtattcccaccaacgtcataagagttccagttgcttcgcattgtcaccaacatttgatatagccaatcttactaattttagactcccaaatatgtgtagtggtattagaattgtggcttaatgccaggcacagtggctcacgcctgtaatcccagcactttgggaggccaaggcgggcggatcacgaggtcaggagatcgagaccatcctggctaacacggtgaaaccccatctctactaaaaatacaaacaattagccaggtgtggtggtgggcgcctgttgtcccagctactccggaggctgaggcaggagaatggtgtgaacctgggaggcggagcttgcagtgagccgagatagtgccactgcactccagcctgggtgacagatcgagactccacctcaaaaaaaaaaaaaattgtggcttaagtttgtgtttacttaatgaatgatgatgttgaatgatatttcatgtttttatttgtcactgaaaaatattctgtggtcaagtattaatgacattgattgttttcagattattagtttttgagagttctttatatattctggatataattgctgcatcagattatggtttgtatgtattttctcccatctacggctattctttaaaaatccttagcagtctctaggccgggagtggtggctcatgcctgtaatcccagcactttgggaggccaaggcgggcagatcacttgaggtcgggagttcgagaccagcctgaccaacatggagaaaccccatctctactaaaaacacaaaattagccaggcatggtggcacatgcctgtaatcccagctactcgggaggctgaggtaggagaatcgcttgaagctgagaggcagaggttgcggtgagccgagattgcgccattgcactccagcctgggcaacaagagcaaaactccgtctcaaaaaaaaaaaaaaaaaatccttagcagtcttatgcctataattccagtactttgggaggccaaggcgggcagatcacttgaggtcaggagttcgagaccagcctggccaacatggtgaaaccccatctctactaaaaatagaaaaattaaccaggcatgatggtgtgtgcctgtactcccagctacttgggaggctgtggtgggagaattacttgaacctgggaggcggaggttgcagtgagccgagatcatgacactgtactccagcctgggtgacagagcgagactctgtctcaaaaaaaaaaaaaaaaaaaattccttaactgtatccttcacaaagcaaatttttattttaatgaagtttaatttctcaatttttaatggattctgcatctttgtcatatgtatgcaattgtaacgtaacccaaggtcaaataatttcacccacattttctttacattttatagtttagattatacattcagttttgtgatccattttgagttaatgtttgtatatagtgcaagacacagatctacagtctttactttttgcatatgcatattctattttttagcattatttgttgagaagagaaattttgactcaattgttcactttgattaaaaaaaactactggaccacatgtgtagaaatgttactggaacatttattctgttccatggatatatttgtctacttgccaaagacattgtcttgattaggattgctaaattttctttgtttttttttcagaattatttggctatttgtttggttatttcaggtacttttcaccttttttttttttttttttttgagatggagtttcactcttgttgcccaggctggacaacaacgacaacgcgatctcggctcaccgcaacctccgcctcccgagttcaagtgattctcctgtctcagcatcccaagtagctgggattataggcatgcgccaccatgcccagctaattttgtgtttttagtagagatggagtttctccatgttggtcaggctggtttcaaactcccgacctcaggtgatcctcctgcctcggcctcccaaagtgcttgggattacaggcatgagccaccacgcccggccttcatcataattttataacttcataatacattgttctttttctttttcttttttaaaagattcaatgattttttttaaagcaataaaaaatagtaaaaaaccctttgtgtttactgaagtggttatcatttctggtcctcttctttctttccggatttccacttggcttcatttttctttgcacccatgcagtttagggatgtctcttatggagcaagtatgctgattacaaacactttcactatggctgaattaataatttattttcccttcatttggaaagatattgtttgctggatataggattctcagttgatatacttgttctttcattactttaaggtagttgttctatggtctcctgatctgcgctgttgctggtaataagtatgtaatgaatcctatctttggttcagtgtagttaatgtgtctttttcctgttgccttaaagctattttaattgttcttgctgtgaagtagtttactgatgatgtgcttggtgtagatttatatacatatatgctcatggtttgttgaacttttttgatttctgggtttataattttcatccagtttggcaaatgtgaaaccagtatttgttgaaatattttttgtcatgctctttcctctgccaaagagtcttgttatttgcatattatgtcacttgtaattttcccactacacagctcactgattttctgttttttgttgttgttgttttttttgctgggtgcttcatttgggatagtttctactgctaggtcacaaggttcactcgtcttcttctctgcagtatctgatttgctgtttattccactcagtgtaatttgttatcccagatgttgttttcatgcctagtagcttgaatcatgtttttttctttagtttttagattgtttggaggtaaaatatactaacagagaatttgccatttcgatcatttttaaaatgtgccatttagttgtagtaaataaatttacgatgtggtgtaaccaacgcagctattgatctctagcattctctcatcactctaaacagaaattgggtactcattaaacacgtccccagtctcccttccccccagctcctgataatgtctatcctactttctctatgaatttggctattctaggcacctcatataacgggaaggatacaatatttgtccttgtgctgggcatggtggtttatgcctgtaatcccagcactttgggaggctgaggcaggcagatcacgaggtcaggagttcgagaccagcctgaccaacatggtgaaaccccgtctctactaaaaatacaaaaattagccaggtatggtggtgtgcacctgtaatcccagctactcaggaggctgaggcaggagaatcgcttgaacctgggaggcagagattgcagtgagccaagatcacaccactgcactccagcctggatgacagagtgagactctgtctcaaaacaaaacaaaacaaaaaatttgtccttgtgtgtctggcttatttcacttagcataatgttttccaggttcattcgggttgtatcatgtatgaggaattcattgctttttctgtctgaatgatacttcattgcacggagaaaccacactttgtgtgtctactctaaacacttttctttttttgtaaagattttaaaaatatatttaaaaactagtttgagagtaattgaattaaatcattgactggaagagttgtttctacagtaatattttggctactgtgaattaagatggctatgaaattggtatacatgtgtctgtgtaagaccctgcttttacttcttttgggtatatacctagaagtggaattgctggtgtaaagagtaatggatgtttcccttttctttttttcttttttcttttttttgagacggagtcttgctctgtcacccaggctggagtgcagtggtgcgatcttggctcactgcaagctccgcctcccgggttcacaccattctcctgcttcagcttcccgagtagctgggactacaggcgcccgccaccaggcctggctaattttttgtatttttagtagagacggggtttcaccatgttagccaggttggtctcgaactcctgacctcatgatccacccgcctcagcctcccaaagtgctgggattacaggcatgagccgctgtgcctgtcctgtttttgtttttgtttttgagatggagtttcgttcttgctgcccaggctagagtgcaatggcgtgatctcggctcatggcaacctctgcctcccgggttcaagtgattctcctgcctcagcctcccgagtagctgggattacaggcatgcaccaccacgcccggctaatttattttgtatttttagtagagacggggtttctccacgttggtctggttggtctcaaactcccgacctcaggtgatccacccacctcggcctcccaaagtgctgggattacaggggtgagccaccacacctgaccttccttttaaatttttaaaatgtttgcttcatatattttgggcctctgttatttagtgcaattatatttataactgttatatattctgtatgatttgagccttttatagtgctcttctttgtgtcttttaacagtttttgacttagtctattttgtgtgacaattgtatagccacccctgctctctttacattactatttgcatggaatatctttttctttcattctctttcaactgacttgggtattgagatctacaatgaatgtgctgtagacaggatacaatttgatcatattttaaagattcattctccctgcctctgtcttttgtttggcaagtttattccatttaattaccgataacgaaggcattatgtctgccattgtactattcgtgttctgtatgactaatagctttgtttttcataaaatacgaggaattccttatgttttcaaaatcagtgtctagtttcttggcttttgattggaaacttttattaacacttaaaggagggagcatagccacactctgcagaggggacaagagggcaagttgaactcccagagctgaatccttatgtatcttgcctcatcaccatgacttggtaatgaggcagggacactctggggacccatttctttttcttatcttttttcttttttgagacagagttttgctctttcgcccaggctggagtgaagtggcacaatcttggctcactgcaacctctgtccgctccccccgccgccccaccccgggttcaagcgattctcctgcctcagcctcctgagtagctgggattacaggcgcccaccatcatgcctggctaatttttgtatttttagtagagacggggtttcaccgtattggcaaggtttgtctcgaactcctgacctcaggtgatccatccgcattggcctcccaaaatgctgggattacaggtgtgagccaccgcacccggcctctggggacccatttcaacagtctggcacccatggttgggaatatgtttaacctctaaattggggttttcctgctgaactgcgtctgaaagactgcttctctgagctagctcatgtttttgctttttctctctattgattcctttatagaatattgctgtcatataagtccagcttttccgtgaatttaacagttttatcctgttatcgatgtgtttttattttcttgaaaataagcagattgagacatcagatgggagaaaggcttgactatgtcgccagcagcctcatgccaaattcctgattcctggaggacagagcccccctcctgctccaaggccaggagatggcgccactggacagtgagtctgggattcctagcacacacttgtgattgctggtccaggaaaaagaagcaggaagggccattagtacaatcagtcaggaaattctgcttaagtgcacatttctccccaggagagtcgggtcactgcactgggaggaagcccgcctgccaagggctgtgtctggaacctgttcatcgcgctccactcagcacagtgagatcgcctcttctgttactcggtctccagggggcgggacctggagccgtatccaatcagggccatggggtggggtcgtgagaactgtggatcaggcgcactgcagggaggtgggtgcgcggcatcttcacccctctaaatgcggctcctactctgtagctgacagacacccacagacgtgtctgtagcatcctctgtcacactgggacccgtactggcagcaggagccgtagggaggactgggacacctggaagccaggaattggtgagtgtgcggggctgagggtcccgagactaggatgggactggttggaaccggcaggaatagaccgtggcgggacccgggcctcttcgtagttgactctgggttctgagacccaagtccccctggcgcacctcggccctggttcctctcaggccgcagggtggggctgcgacggcagccgagacccctagccgtccggtccagtccctgtgcaactgactgtggccccaggcccagcgccctctctggtcagctccgcgcccgctgccccagtcacgcccgctgcctccgtgtctccccagattgtacgggggccactagagggtcatgggggaaatcctgcctcgagtatggggttcgtgtgagaggagctgtaggctgtggggtccccagttccctctttctcaccaggggcttttgtattttatctgagtttcccaaatatacgcgaagcagggtctcaaatccgcgactgtggtccctaggctaccttctcctaaggctggcagcaaatttgggatttcctgatccctttccgcattttataacacggatttcctttagttcacaacagtatcacttcttcgtcctccaggctatgtttcaaacacaggcagtattttaatcgtcatttttttagagggcagtatatggccgttttaaaaatatttgttttgtgtttgtgaacgtttcagagaaaaaccacctgacactccgctgtaaacaatctttgtgtctctttttatctgccctaggcacagacaccttctgagaatgtcttgggttgagattcccctttggaaactttacagtgatgcgacctcagcccaccctctgccttttcctgatcctgggtttcaggactacctggggctggcccaagatgcctacagctgccaagtctcttgggaaagtctagtgaatatcagcccctaggtcgttcctcccaaagagcctgaggtgtggcggtgaggcctccccagggagcagctggatgctatggggtgggaccagtctcctatatcattattgtaaaaaactaatcccttgggacacgccttttcttctccaacccgtttccattccttggggacacatggctagtcagccaatcaaattctggtatggaggaaaccaaattatttctgtcctgtaatcctagcactttgggaggccaaggtgggtggatcacctgaggtcaggagttcaagaccagcctggccaacatggtgaaaccccgactctactaaaaatccaaaaattagctgggcgtggtggtgcacccttgtaatctcagctactcgtgaggctgaggcagaattgctagaacccgggaggtggaggttgcagtgagctgagattgcgccactgcactccagcctgggcgacagggcaagactccgtctcaaaaaaaaaaaaaaaaaaagaagaaatgatttctgtcctctggattctctcagtctagtgaaagaagaaaaccacccccaatgagttgttgcaaggacctgaaaagcacacagttgagtgtcttctgggagggtggtcactgagcacttcagggagcagcttggaggtggggggatgtcccaagtgataggatgatgtgacctgacacttgagtcagacacttgagtgtttcaggtcagcactgcccctccctgggtttatcaccttgaaaaaattggtttactcatttcagcttcaggtttttttttttttttttgagacggagtttcactgttgttgcccaggctggagtgcaatgacgcgatctcggtttgccgcaacctccgcctcccaggttcaagtaattcttctgcctcagtctcccaggtagctgggattacaggcatgtgccacaatgcccacctaattttgtatgtttagtagagatggggtttcaccatgttggtcaggctggtctcgaactcccgacctcaggtgatctgcccacctcagcctcccaaagtgctgggattacaggcgtgagccaccatgcccagccatcagcttcagttttttttttttttttcttttaggattgcttttatgagctaggcatatttgtatgggaagggggaatttttttttctttttttagtatttatttatcattcttgggtgtttctcggagagggggatttggcagggtcataggacaatagtggagggaaggtcggcagataaacagttgtgaacaagggtctctggttttcctaggcagaggatcctgcggccttctgcagtgtttgtgttcctgggtacttgagattggggagtggtgatgactcttaacgagcatgctgccttgaagcatctgtttaacaaagcgcatcttgcactgcccttaatccatttaaacctgagtggacacagcacatgtttcagagagcacggggttgggggtaaggttatagataacagcatcccaaggcagaagaatttttcttagtatagaacaaaatggagtctcctatgtctactactatctacacagacacagtaacaatcttatctttcttttccccacatttcccccttttctattcgacaaaactgccatcgtcatcatggcccgttctcagtgagctgttgggtacacctcccagacggggtggaggccaggcggaggcgcccccccacctcccagacggggcggctggccaggcgggggctgccccccacctcccttcctcctggacagggcagctggctggtcgggggctgccccccacctccctcccggacggggcagctgccgggcggagaccctcctcacttcccagacggggcagctgccaggcagaggggctcctcactttcccagacagggcagctgctgggcggaggggctcctcacttctcagacggggtggccaggcagagacgctcgtcacctcccagacggggtggtgttcaggcagagacactcctcagttcccagacggggtcacggccgggtagaggcgctcctcacatcctagacagggcagtggggcagaggcgctccccacatctcagacgatgggcggcaaggcagagacgctcctcacttcctagatgggatggcgccgggaagaggcgctcctcacttcccagactgggcggcagggcagaggcgctcctcacatcccagaccatgggcggccaggcagagacactcctcacttcctagatgggatggtggccgggaagaggcgctcctcacttcccagactgggcagccgggcagaggggctcctcgcatcccagatgatgggcggccaggcagagacgctcctcacttcccagacggggtggcggccgggcagaggctgcaatctcggcactttgggaggccaaggcaggcggctgggaggtggaggttgtagcaagcccaggtcacgccactgcactccagcctgggcaagattgagcactgcgtgagcgagactccgtctgcaatcccggcacctcgggaggccaaggcgggcagatcactcgcggtcaggagctggagaccagcccagccaacacggcgaaaccccgtctccaccaaaaaatacaaaaaccagtcaggcgtggtggcgcacgcctgcaatcccaggcactcggcagtctgaggcaggagaatgaggcagggaggttgcagtgagccgagatggcggcagtacagtccagcctcggctcggcatcagagggagaccatggaaagtgggagacgagggagaggctcagcatcagagggagaccgtggaaagtgggagacgagggagagcagcttcagttttttaataactgtaaaatgcactatattattagagatggatggagaagttaaagtatttccaaacatgccagaagaaggtaggttttggtaggttttaggaaaaaaaaagtctagtcttgtattcccttataaaaattcttatttttcttcccagagcctgggtagtaagtttctcagctcctttttctattgggtgatttcaaatggaattctaggccttagcatgaaaatactaccagggaaaagaaatagggaaaaaaacctctcttccattttggttacagaaaaaatgagttgttttcaaaagaaagtgtggtggattatactggtgaattacaaagatgttccataacctcagttcttctccttctcaggttgaagaatttgtgaccgtggataagttcgtttcctgttatgtgaacttggcagattaatgctaaatcctgtgggacagcatttagcaacacctaaaaaagtactcaattatgattttttgtgtactaaatgattatggaaatactaattctgtgtggaaagaacacactcaaagggctttttctattctttcaataacaacaatcaacacagaagacttttgtgaccaaaagcgtgggttttctccctaccaaaaggcaagcagtgtatcctgcagtggacagcaactgggtctcttccaattcagttttgacattctctaccctggagatagtttcagagcccataggttgatggctcagtccccacatccctccctccctgcctgccactccctaccattcaggtatcagtggtaagtctggaccaattataacccacaggtttcaagttggagttcttgtgctctctttgggtttaacttgctattgtggcttgcagaactcagggaaacacttactcatcttcacagtcttctttcatttctttttttgtagagatggagtctctctatgttgcccaggctgaactcctggcctcaagtgatcttcccatcttggtctcccaaagtgctgggattacaggtgtgagccaccatacctaactctcaggtttctttctttttattttttttttttgagacaagagtctcacactctgtggcccatgctggagtgcagtggtgcgatctcagctcgctgtaacctccactgcccggattcaagctattctcctgccttggcctcccgagtagctgggattataggtgcacaccaccacgcctggctaatttttgtatttttagtagagacggggcttcaccatgttggccaggctggtcacgagctcctgacctcaagtgatccacccaccttggccccccaaagtgctgggattacaggcacgagccactgcacccagccaaggatattttaaaggatacaaataaacatccaggtgaagagatacatagggtgaggtctagaagggtcttgagcacagtagcttctgtctctggggttagggtgtgccaccctcccagctgatggataagttcttgtttaccttcctataagcctgcatgtgttgagctgtctgggagctttctgaatcctgtactctggggccttttcttgagacctcattggataggcatgattcataactatgtagaaattagctggacaaaaaaggtagaatctaatactgatagactgaatgggaaaatccaccaagccctgtctgttcagattctttttggcttctctatgtagcattccttcctccagggtatgagacaggaccccttctgaaatgagcgtctgatgacccacaatcagaaaagctgggaagattagactccttccttgggcaggtgaaggacagcaggaggtcagtgagagaaattctgtcttctcagtcctgcctctgaagcctacagtgccacagcactataacaggggctgtgacagttacgagccaggaaaaatgcaaaaattagccaggtgtggtggcgcatgcctataaacccagctacccgggaggctgaggcgggagaagtgctggaaccaaggaggcggaggctgcagtgagccgagattgtgccactgcactccagcctgggtgacagtgtgacttggtcgaaattaaaaaaaaaaaagttccacatatccctagggcagaggcacactgcagccaagctctttgctaaggaaaaacaaaagtgacctgtgcttcagttcccaataaatacttataagtattgtcctttccatctgagacctcctcagcctgaactttatatcactatcagcattttggtcacaaccattcagcaagcctctacaaagtctcaaactccctcatcttcctgttgtcttctgagccctccacactcttccaaacctctgcctgttaagaagttccaaaaccaattccacattttcagatatcttgatagcaatgcgccacttctcagtaccaattttcttgtattattccattcttgcagcatgataaagaaatacctgagactgggtaatttataaagaaaagaggttgaattggcccatgattctgcagactgcacaggaagcatggtactggaaggatggcatctgctcagcttctagggaggcctcaggaaactgacaatcatggtggaaggcaaagggggagcagcagttcacacggccagagaaggagcaagagagagcagggcaaggtgccacagacttttaaatgaccggttctcacaagaacttaccatctcaagaacagcaccacagggatagtgctaaaccattcatgaaggaccaccatccagtcacctcccacaaggccccaccttcaatattgggaattacaattcgacatgagatttgggtggagattcaaatccaaaccatgtccttttgcttttttctgttttgtttgtggagtagatttttctccatccctttactttgagcctaagggtgccattgcatgtgagatgggtctcttgaagacagcataccattggatcttgcttttttatccaagtcaccactgtgccttttaattggggcatttagcctgcttacattcaaggttagtatttatatgtgtagatttgatcctatcatgttgttagctggttattatgcagacttgtttgtgtggttgttttatagtgtcactggtctatgtatttaagtgtgcttttgtggtggctggtaatggttttttctttccatatttagcactcccttcaggacctcttgtacagatgttctctttcattgtaatcacacaggatgggctatgtcacccaaataacatgtggtggtgattaacatgtgaaatgttacctgccagggtcacgcattacagactctgtgcccagagtattttttcatggctcttgttttctgttagttgtaatagaatacctgaaatttggctgggcgcggtggctcgtgcctgtaatcccaacactttgggaggctgaggcaggtggatcatttgagaccaggagtttgtgaccagctcagccaacatggtgaaaccccatctctactgaaatataaaaacaaagccgggcatggtcatgcatgcctgtaatcccagctacttgggaggctgaagcatgggaattacttgaactgggaggtcgaggctgcagtgagccaagattgccccccctgcattccagcctgtgcaacagagcaagactgtttccaaaaacaaaaaaaaacaaaaaaccctgaatttgggttaatatataaaaaatacttattttgtacaattctcaaagtttggaaatccaagggcaaatggggtacatctggtgaaagcttcttgctctttactgtctgaggcagtggagatcactaggcacgggggctgattgtgctaactctggtctctttctcttcttacaaggccacaagtcttatttgtaggataacccattcattcattacctcttcaattcgtcagtggattaatccattcatgaggcagagccctcatgcctcttaaagggccctgctttcagtactgacacattggggatcaaatttcgttatgagttttggaaggggaaattattcacacttagcaagggctgattaggtacactgcttctgctgaaaataccacactctcagagggaaaatgggaattaggcaaataccatattgtttgcataagtagttaaggcacacacaaccccatttattagttatgttggtgcagatcttcccaaatctagcccctagataccatcaaagttcaactttctaaataaacgtgtaagaatatgcagtctcagaactgctaatttgtctcttatagacagtatgtttgggactttctcatgagaggtaatactgacccactatacagagagacactagaggtgatccaggcagcatatctcagtctctgaaatcaccaatgagaggcatgtccttgttggctgtcactttactgaatatattcaattctagcatcagaattgctgtgatggagaaagtgagtgtagacagaagacaagaggctgaccaagtcattgaataaatttttggagtccacagcatcgtgtgaacttctgaagtgagtatagattcctaatgctgttggtctgaaccttcctcctctgccatgtgggatgtttcaggactcagtgacctttgaggatgtggctgtgaacttcacccaggaggagtgggctttgctgggtccttcccagaagaatctctacagagatgtgatgtgggaaaccttcaggaacctgatgtctgtaggtaagggtgacatcatttcttcacttagtcaattatagaacaagtgtttcttggtcttctgcattgctcaatgatttggaacatggtagggaatacagcagacccttgaacaaggtgggggttagagactctgatcgtccacacagtctgttaggtgcctgtgaatttagagtccctaaagagttaactactaatagactgctgttgaccaaagctgtattgataacagaaagtcaattaatacattttgtatgtttggtatatatctatatacatatatatggccaggtgtgggggctcacacctgtaattccagtactttgggaggctgaagtgggaggattgcttgagctcaggattttgagactggctgtagcaatgaagtgataccctgtctgtataaaaaataaaaaaagtagccatggatggtggcacacctgtgttcctagctattcagaaggttgaggcagtaggttcgcttgaactggggaggttgagcttgcagtgaaccatgattgcaccactacagtttagcctgggcaacagagtgagtccttgtctcactctgtgtgtggctgggcatggtgacttgcgcctgtaatcccatcactttagaaggctgaggcaggtgcatcacttgatgtcaggagtttgagaccagcctggccaacgtggtgaaaccccatctctactaaaaatacaaaaattagcttggtgtggtggcatgcacctgtaatcccagctacctgggagggtaagggaggagaatcacttgaacctgggaggcagaggttgcagtgagccaagaccacgccactgcactctagcctgggcaagagagagagactccgtctcaaaaaaaaaaaaagtgcgtatgtgtatatatgtttaagacagggtcccttgctaggtctagaggcgagtgccaccatccccagctaatttttgtataatttttttgtaaggtggagggtcgtgaactcctggcctcaagcattcctcctccctagcatcccaaagtgcagggattacaggcatgagccaccatgccaagcctgtttggtatgttatgtactgtattcttataatacagtaagcttttcttttgaaaaggttatcaaaaaaattagaagagaagatatgttgactttagtaagtgcaagtagattatcaaggtgttcttccttggttgtcttcatattgagtaacctgagcaaaaaaggagggtttggtcttgctctcttagagatggcaagagctgatgaaaatgtgcatgagtgaactgtgcagttcaaaaccatgttggtcaaggttcaactgaactttggtgaataaatcagccatggccacagtgtcccatgaacatagaatctaataatttttctataattttgtaataacttatgatgacttttatgggtctgcattttaggaataaaatgtgaagaccagatcattgaagatcagtacaataattccaaaagaaatctaaggtcatttgcacttacaacctagagctatgtcccttaagatattgttagaatgacaacaaatgttaaaagcaagcaaagaaaatgaagcagcccagcttcaaattcattcatttttagaaaaaattttccaggctgggcatggtggctcacacctgtaatcccagcactttgggaggtcaagggaggcagattgcttgagcccaggagttcaagaccagcctgggcaacatggtgaaactccatctgtacaaaaatctaaaagttagccaggcatggtggcatgcacctgaggtcccagctactagggaggttaaggtgggaggatggcttgaacccaggaggtcaaggctgtgatgaatcgtgaacatgccactgtacttcagcctgggtgacagagtgagaccttgtctccaaaaaaaaaaataactattttccaaaaacaatatacttacacaagacataaatatccagtgttttcaaaatagttgccttggagccagtgttaagaaattgattatgaatatcaatgttttgataataagtgtaatgcagcccttttgcagagtattcagtccattgatgtttacacagttcagacaagccagaaaacctactttccatcataatgcaaaatatgtaaatcaaatacctactaatgaatataaaatcatttataaaccagcccttggtattgtgcttatttctcacagaagtcatatggtagagagagtctgaaggtaaggaagatggtcaatgtgaagagatcttcagccttgttccaaatggtatagtgaagacgacttttactggagtcaaatcatgtgaaagcagtgtgtgtgaagaaggcaatatggatcattcatctcttaattgctgcatcagagctgacactggacacaaatcagatgagtgtcagcaacatagaagccacataagcagtgtgtgaaaaccttcagctattgccactcctttcaaacacatgaaaggcctcacactggaaagaaactccatgtaagaaatgtggaaaaaccttcatttctgttcaaaccttttgaagatacatggtaatgcacagtgaagatgaaccttataaatgtaagttttgtgggaaggcctttgataatctacatttatatcttacacatgaaagaactcacactggagagaaaccctatgaatgtaataaatgtgggaaagccttcagttgttccagttccattcgaaaacatgcaagaattcacactggagagaaaccctatatatgtaaacaatgtggcaaagcctttagatattccagttctattcgaaatcatgaaaacactcacactggtgaaaaaccctgtgaatgtaagcaatgtgggaaagcctttagttattccagttactttcgaatacatgaaagaattcacactggagagcaggtgtataaatgtaaggaatgtgggaaaacattcacttatcccagtgcctttcataaacataaaagtacccacacttcacagaaactttatgaatgtaaggaatgtgggaaagcatttgattgttttagttcctttcatagtcatgaaggggttcacactggagagaaaccctatgaatgcagaacgtggaaaagccttcagtagttctaagtacttaaaaatacatggaagaactcacactggagagaagtcctatgcagtaaagaatgagggaaagtattttattgtctcagtccccttcaaagacatgaaaggactcacatcagagaaaagttgtatgaatgtaaaaaatgtgataaagccttccattcgtccagtactgttagaaaccatgaaagaagtcacatttaagaaaaacacagtgatgttaggaatatggggaacctttcctttctcttccagtctttggaaggcacagggtatgacacactggtgaccttataactgtaaggagtgtggataagtatttattagtccttgtgtgttttagatacatgaaagaatttactcaaaaggaaactctatgaatgtaaagaatgtggtaaaacctgtgtagtttcagtttctcttgaataaagtcatttcctggtattctcaggggattggttccagcaccccttgagaatatataattttgctcaagtgctttacagaaaagtgtatttgcctataactaggcaatcctgtatactttaaatcatctctagattacttataatacctaatgcattgtaaatgctatgaagacaactgttttattgtatttagggaagtatgacaagaaaaaacatctgtacatattcagtacagacacaaccaccatacggctacctacctagtacacatcatctacaatataacattttctttttaaaaaacagttatggattggtttcattaaatgacctgcaagcgtgtgttaaccttctgtaaaaccctggttattttctcctggtagcccacacatgatgatgatgaggatgatggtgattgctctgtggtgcctaaagttgcaacatgttgaggtgccaagatatgtggcagtgtcgataagcaatgagatgtcaattaaactagaatcatctgacaggacattagaagtatcatctatgttggaggtaccaacttctgactgcagatgttgactctttcatcaataatacaaatgttggatctacggaatttgagggtcaaagatatttaagcattgatggtcccacagattctagttggggacattatcaaggatgcagtttacccagagcgattaaccctagtggaggagctagattaggaaagtttctggggtcatggttaagtctaggttctacttggaatggatatctaaccagaaatctttcttgtatcattagtagagttgcccatttcaccaccgaagccatcaggacacaagagaagtctctaggttcccttgcctgcatggccctagacaaccacattgcagctatctccctactttacagggtagtgtctgtgctaacccttgcttctgcatctgggtaaaatacttccagtcagactgaattgggaacatataagatcttaaaaccagccaaatctctgaaagggacaccttcagaaaccctcctgtctagacttactgggttacatttccaatttccagatattttcagctggctcttcccctggtataggatttcttctccattctgccctacaagtctcaatgatcctatttaaaatatgcatttggctcctctttaaaattgttctatcttgtttcaacagatgcctccaagagacccccactaggttcttgctgacctaatacttgagattttaaactcactccagctggccactgaaaccaacttaacccaagagattttggctaaaatttaacaggttcctgagaacctcttataagtaaatggctatagttgcccaactggccactgccctgccattaggatccctgcatgggatggacccacagcaggtcactggtaccatgatagaacacacacaaaaacttatgaatgctgtctgtggacgggttagagtcagtccttcacactggctaactgggcctaagttttaaaaagagctaagccgccacttgttaactaggggtcacaagcactgtgagtttcctgaaaaccaacacctttttaactttgggggctcacctgagctagtcaatcagagctcagctgtatcaaccaatcagaactgagtttcaagtttcagatcttcatttgcataaaagcacttgactaggaacccagatgggaacttttgctataaaacctaagctttcccttgttctctggaacaaataatgtttaggttgcaaactccttatgccttttccccagaactatgtagaaataacgccttctaaaatgtgatcttgataccagggaactcctttttttttt
